United States Patent Application Publication US 2012/0107916 A1 - sequence listing, part 5

SEQ ID NO: 15 - DNA, 3940880 bp, Clostridium acetobutylicum (residues 1,970,441-3,940,880 of 3,940,880)
tgatgatgaatataagcaatctttttgggaaagaaataaatggagtaaaaataaataattctgtagatttttcaaaagaacttcttagcgaaaataaagttgctgtggttcctggtacaggttttgggaatgacaactatgtaagattatcctatgcaacatcaatggacaatatagttaaaggacttgatgaaatagagaacttcataggaaaattacgctaaaagaagcttatatgctttgatttttaaataaatggtatttttcttgaacatgctattaatttatgttatactgtaaaaagcttgttatgagctttttatagtaatattaattttagaggtgatttgtatggtaactaaaagcgttgttgttaaaagttcaactggtttacatgctagaccagcaactttacttgtaaaaaaagcatcaggtttcaaatcagatgtaactatggaattcaatggtaaaaaagctaatgcaaaaagtcttataggtgttttatcattaggagtttcaaaagatagtaatattaagttaatcgtttccggtgatgatgaagctttagcagctgaggaaatagttaaattaatcgaatctttagatgagtaaaaaatcaactaaaaaacaatgaaatttaattttcattgttttttttatttattctagctcaaaattatcatatagaatcgataaacacgaacaaaaatattatatttacctaaaatatatgttataatataaacgaatttaataaacctaatatttatgtacggaggtatagtatgagaaatacttatgaaacaccacttaatacaagatatgcatctaaagaaatgagttatcttttttctgatgatatgaaatttagaacatggagaaaactttgggttgctctagcagaaagtgaaatggaattaggacttaatataactaatgagcagattaacgaattaaaagctcatattgatgatataaactacgacgttgcacaagaacgagaaaaaatagtaagacatgatgtaatgagtcatgtatatgcttatggcgttcaatgtccatcagcaaagggtataatacatttaggtgctacatcctgctatgttggagataatgctgatattatcataatgaaggaagcccttatacttataagaaaaaaacttcttaatacaatacaccatttaagcaaatttgctttaaactataaatctcttcctacacttggattcactcaccttcaacctgctcagcttactactgtgggtaaaagagcaaccttatggatacaagatttaatgatagatttagaaaatcttgattttgtaatagaaaatttaaaattaagaggtgttaaaggtacaacaggaactcaagcaagttttatggacctttttaatggagaccaggaaaaaattaaaacccttgagaaaaaagtagttgaaaaaatgaactttaaatcggcatatgatgtaacgggtcaaacttatcctagaaaaatagattctatagtactaaatacactttcagagattgctcaaagtgcttataagttcagtaatgacttgagaatacttcaaaatatgaaagagatggaggagccttttgaaaaaaatcaaattggatcttcagcaatggcttataagagaaatcctatgagatctgaaagaataagtgctctatcaagatatataattgtaaattcacttaatcctgctattactgcggcaactcaatggtttgaaagaacactagatgattctgcaaacaaaagaatttctgtagcagaagctttccttgcgctagatggtgttttgaatctttatataaatgtatcgtccaatatggtagtatatgaaaatgtaataacagctcatgttaagagtgaacttccttttatggcaacagaaaatattatgatggaagctgtaaaaaaaggttgcgacaggcaagaacttcatgaaagaataagaaaacattcaatggaaacagctaaaagaattaaagctgatggattaccaaatgatttaatagaaagaataaagaaagattcttattttaaattgacagaaaaagaaattgatgaaataatagatccaaataaatttgtaggtagagccccatatcaagtagaagaatatataatcaattgtgtaaagcctattttagttaagaataaagatattgtaggtatagaagttagtattgatgtttaaaatatttacacatcattggtaaaagtatataataaattaggagaaatattttcccaaattattatatgcaaagggtgactatatgtttaaacaaaaaaaaattatttttattgctattatagttatttttattttttctggttgctcaagtttgcaagataaatccaagaatcaagtaaaatccaaaaacttaacttcttcaactaagaaaaaagttaaaaaagcaaaggaaccacctaaacccaaagtttttaagttaggttctagcggaagcgatgtaaaaagcattcaagacaaacttaataattatggctatgctattacggccgatggaaaatttggtccttcaactgattgggctgtaagagactttcaatataaacataatatagctatggatggaagcgtttctgatcaaacaatgaatttactaaatcaaacgccaactgacgcaactagagtaaattccgttattcagccagatcctaacccagatgtacaatcactaaaagctgcagcagaaaatttagctaattctaatgatacacctacttataccaagttctttataattacatcgctaaaagagcagagggtatatgtgtttaacggtgatcctcacaactggaagttaataaatacctttcagtgtacttcaggagcatctgatacgcctactataacaggtcgtttctatgttcaaggtaaaggtttagcctttaaaacaagtaacgatgtaatttgtaagtactacactcaaattcaaggaaattatttatttcatagtatactctttgataaaaatggaaatgtagtagatggaactttaggtgcttcactttctcatggctgtattcgactagctgtgcaaaatgcaaaatatatatatgatacattaccaatgggaacaggaatatggatatactaaaacaaataagatgcatatctttaagtatgtatcttatttgtttttaatttatttttcaatattaattggggtaataagatggtataatatatatagtaaaagtaggttaaaataataatttgatcgataattggagttgtgtattatgtctttaaaaacttcttttgatgaaaatataaaacaaaaacataaaattgaaaaacccaaaatgtataaagtaatactacataatgacgattatactacaatggagtttgtaattgaaatcctcatcaatgtattcaataaagtccctgccaatgcagttaagataacttttgatgtacacaaaaatggaataggaatagcaggagtttatccatatgatattgcggcaacaaaaataaatgaggttaagaaattagcttacaagaatggatatccattgaaattgactatgggggaggtatagaacttgaaattagatgagattgtaaatgaaattattacagcagcatatagtgaagcaaaatttgatatgcataaatattttacacctgaacatattttatatgcttcgctattttataatgatggaataaatataataaaaaacacaggcggttctgttgagggtttaaagaagcagctagaaaaatattttatgaaaaatgttgagaaactagaatcaggagatccaactcaaactgttggtgttgaaaatataataaatcaagcagctaatcatgttttaactagcggaaaggactacgtaactataggtgatatatatgtagccatttatgacgataatgcatcctttggaagctattatttaaagcaacagggtattactaggcttaagcttttgaattatattacacatggaatatcagctgtaaacgatagtgatgaggatgatatagagcctttgccagaaaatgaatacttatttgatgattatcacgaagatgaagtttgtgctattgataaatatacagaggatattactgaaaaggcaaaaaatggccttatagatccactaataggaagagaagatatactaaaaaagacacttcaagttctgtgtagaaggagaaaaaataatcctattcatgtaggagaacctggagttggaaaaacagctataactgaaggacttgcaactttaatagctgaagataaggtaccgactgttttaaagggaagtaagatttatacattaaacatgggaacaatggttgctggaacaaaatataggggcgactttgaagaaagaataaaaaatgtattaaatgaaatttcaaaatgtgaaaaaccaatagtatatattgatgaaattcacaccatcataggtgctggtgctgtatctggcggaacagttgatgcagctaatatattaaagccatactttacagatggaaaaataaaatttataggatcaactacctatgatgaatataagaaaatatttgataaagatagagcattgtctagaagatttcaaaaaatagatgtaggggaaccaacaattaatgaaacctatgacatacttatggggataaaaaccagatatgaacagtttcataatgtacactacaccaatgcttcacttaaagctgcagccgctctttcagcaaaatgcataaatgatagatttttacccgacaaggcaatagatgtaattgatgagtgtggtgcatttgctgaaatgaataggaaagatactgagaaggtttatataaatgtgaaagatgtagaaaatgtaatttcatctatatcaggcataccagtaaaagacttatccaaaacacaaatagaaaagcttaaaaatctaaaaaagaatctgaaaagcaaaatatttggtcaagacaaagctttagagtctatagtccaatcaataaaaagatcaagtgctggttttaacgatgagaataagccagtagcaagttttctttttgtaggtcctactggtgttggtaaaacagaaatatcaaaacaattagcagaagctttgaatataaagctaataagatttgatatgagtgaatatcaggaaaaacacactgtagcgagattaataggatctcctccgggttatgtaggatatgaagagggaggacttttaacagatgcagttagaaaaaacccatattgcatactacttcttgatgaaattgaaaaagctcactctgatattttaaatgtacttcttcaagttatggattatgctactctaacagataacagtggaaagaaagctgattttagaaatattatactcataatgacctctaatgcaggagcttcagaggtaggtaaaaataaagttggttttggtaatagagtagttggtgaggataatatcgataaagaggtttctaaaatattctctcctgaatttagaaatagacttgatgatataataatattcaataaaatggatgaggatatggctatacgtgttgctaaaagatccctggatgaattccagcagaagctaaataaaaagcatataaaaattaaagttactgatgaatgctataaatggattgcgtctaagggattaaactcaaattacggtgcaagagaaatcctaagagtgatacaagaaaaaattaaaccttattttatagatgaggttcttttcggaaatctcactaaaggaggagaaacattaatagacgtaaaagataataacataaaatttgaaagtatagataagtaagcagattttctaagcgttgacaattaaaaagaattgtactatagtataattactatttagtgataaaatttcatattatttcttatcaagaaggtggagggactggccctatgaagcctgacaaccggcaaatgtacggtgttaattcctgcaaaacttatttgttttgaaagataagaaaacagcttattaattaatgagtatgttaataatccgtttttcttattggaaaatggattttttttatatattaaaatttaaactaggacggtgaaaaaaatgcctataaaaatacctgataatcttccagcagcaaaaactttaaatgaagaaaatatattttttatggatgaggatagagcctatcatcaagatataagacctcttaatattgttatagttaaccttatgccaacaaagatagtaacagaaactcaaatattaaggctaattggaaattcgcctcttcaggttaatccgacctttattcatacacaaactcataaatcacaaaatacttcaaaggaacatttaattaaattttacgaaacctttgaagagattaaaaacaataaatttgatggcatgatagtaacaggagctccagtggagacactttcctttgagaatgttgattattgggaggaactatgcagaatttttgattggtcagttactaatgtaacctcaactatacatatatgttggggggcacaggccggtttataccatcattatgggatacctaaatacgagcttcacgaaaaactatttggagtatttaaacataaccttactgaaagaaatataaaattgacacgaggttttgacgatgaattttatgctccgcactcgagacatacttatgtaaaaagagaagatattaaaaagaatcctagcctaaagattttagctgaatctgatgaagcaggagcatatatagttgcatcagaaaacggcaaaaatatctttgttatgggacatgcagaatatgatggtgatacattaaatctagaatatattagggataaaaatcaaggtatgaatataaaaatccctaaaaattactttaaagataatgatccagagaagggacctatggttacttggagaggtcatgctaatcttttattctctaactggcttaattattatgtatatcaggagacaccatttgaactatagaattatgagagtaaagtattattaaaacatagaaagtgtgttattatgaaaatcggtagactactagggattttaaatatacttgctaatactgatagagccacagtacaagaattataagaaagatttgaagtttctaagtgtacaattcttcgagatctggatatgttgaatgagtcagtgattacaattattacatattcaggacttattcggcctcataaacttgtttttaagcagttatattatatttatacgcttataagcaagagttccgtttatttaaaatcaatataattgctacctataaaattatggatgcaaatttcaattgtaaagctgttaaaaaaatagattttagaaaagattttgctattggtttgttttcatcacaagatcaaaaatcatcgtttaaagttatagaaccacttgaactaaaaaaattaataaaaactcgaataaaaggaatatataacctctacaaagatgacatataggtgtcatctttttcgttattatactgtaagttattatcccaaaaattttgatatgttgttactgattggaggctatgcttggatgaaacagaaaaataatgttatttatcctattgttgagtatgccattcaacataacattccgttaccaacaatttcattgaaaagcaagcagtttacgatgattcaggtataataattgcaaatggtacagcttctttagaatttgctaaggaaattatattatatttgaatattaaaactagagaaaaagtttatgaaatgtatctatataataagctgaatagttaattaaaaaaacttataggtgatgctaaggaaaatggattttattatagtggaaatgctataataaaatagttggttatatttgtgacttttaacatatgacaactacatgaaagtaataaatttaaaattgagtataaaaattggaattaatagattgattttgagtcaaggatggattgtatttaaagccatataagcaatctttagaacaggggaaaatagttgtgaaggaagctttttcaaatactattttactttacataaggagttgataactatgataaataaaatcttacttcaagatgtactagaagcgtctttagaaaagggtgcagactttgcagaaatatttgtagaggataccatttcaaatgatttatttatgagtgcgttaaaactaaaaaaatccactacaaatagagtatttggaattggcataagaataattaaaggattaaaaagcgtatatgcttatacaaattctacagataaggaaactctcttaaaaacagttaatgaagcctcattggcactaggggatttaaaactaaataaatctataacactaaaagaaagattgaatttaaatattcatcctataatatatgttccatcatcagtcagtaccttagataaaaaagctataattgaaagagcatctgtttctgcaaaaaactatgataaatctatagttcaagtagaagctacttataaagattctgatcaaaaaataataattgctaatagcttgggactatacactacagatagaagagtacattcaagaatgactataacatctatagcaagtaatggagttgaaaatcaaactggatacattgcaccaggaaggagcatggggattgaaatgtttgatacaataagtcctgaaaagtgcggattagacgccagtcaaatggcaataactatgttaaatgccaaaccatgtccttcaggaaaaatgactgttgccatagaaaatggttttggtggtgtcatatttcatgaagcctgtgggcacgcactagaagcctcatctgtatcaaaaaacctctctgtgttttcaaataaattaggagagaaaatagcttctagtaaagttactgctatagatgatggtacgataaaaaatgcatggggttcaataaatattgatgatgaaggcaatccatcagaaaaaaaggtactaatagaaaacggaatattaaaatcgtatatgatagattacttaaacgggaagagaatgggagttaaagctaatggcagttcaagaagagagtcctataaatttgcacctacctctagaatgacaaacacatatatagcagcgggagaggatgaatcttcagatattatagcttctatagataatggactttatgctaaaagaatgggtggtggctccgttaatcctataacaggtgaatttaatttctcagtattagaagggtatcttgtgaaaaacggtaaaataaaagagccagtaagaggtgcaagtttaataggaaaaagtacggaaatattaaacaatatagatatggttggaaaaaatttatctttaggttcaggtacatgtggagcagcaagtggtaatattcctacaaacgttggtcagcctcttataagagtatcagaaataaccgttggagggcgttaaaatggatatagaaaaatttaaagagaaattaatagaagaagcaaagaaaaacgatatatcttcttatgaattatattatgagtacagcaacaacttaaacatatctagctataatttagacattgacaattactctgtaagtaaatcttttggtattagctttagaggtatatataagggaaaattaggtatggcatctacagaaattttagatgatgaatctataaatcttcttataaaggctgtaatcgataatgctttaagcaatgatagtacagaaaaagaaataatttttgacggaaaaaatcagcattatcataaagtggatacttttaatgaaaatttagcatcgataccctcaaaagatagactatgcctttgtcttaaacttagtgaaaaggcccaaaattataactatagttctaactttaagttgaaagcagttatggcagaggttaattatacagaaaagaaatacggaatagttaactcagagggattgaatttaaattacaaatccaatcatgaagcatccattttagaaatagttctaaataaaggagaggagactaatacggattacgcttatgccttttataagaacagatctgatttaaatgaagatgaacttgtagaaaaagccataaagaatactattgatagatttgatggtaaaactgtagtctcaggaaaatataaggttgtaataaaaaactccacctttgcacttatgcttagaaccttttgggaagtttttaatggtgaaaatgtaaacaaaaatctctctttattaaaaaataaattagaaaaagtcgttgccagcaaggcattaacgcttattgataacccacttttaaatgcaatgaattcaaaaccttttgatgcagaaggggtagcaacaaaagagaaaaaaattatagaaaaaggggtcttaaaaagtttctttcataatataaaatcagcagaggaaagtgggacctttagtacagggaatgcatcaaaagcaaaatattcatcatctatatcagtttcaccaacaaatctttatatagaaaaaggttataaaaactttgacgaaatactagcttatgtagaaaacggacttctaataaatgatcttcaaggaacacattctggagctaatgtcgaaactggtgatttttctctttctgccaaagggatgcgtatagagaatggagttttaacaggagctgttgagcagataactatttcaggaaacttttacaccttacttaaaaatatagaagaagtagcagacgatcttgaattttacttgccaaattcaacaggatactttggaagtcctagtgtagttataaaagaaatttctgtatcaggggaataaaaatacaaatggtaagaataatatttatctatttttaccatttgtattttttttaatttccagtaaagtagaacccctaaaggcatatagttgataatagctatcacttgattatcaataaaatcaaaagaagaaggatttttacttaaatatatatttaggttttttaaatagatttatgtttatgtacctaaatatgatttttcaaaaagttttttgatattttttaatataaaagcatatataaaacttattaaaaaaagaaggattttccccctctttttgtagaatatttattccgtaaaataggaatttgacgaagtaacggaggttttttatgaaatattcactaaaacaaataaacgatccaagtttaccagtatcactcaaacaacttttttaaactatttaagaactattagggctaaatctgagagaactatctataactacaaaatagatttaattctgttttttagatttttaaaattatacagaggcttatcaaaagatgcggatttcgaagatattgtaataaatgatattgatagtagtttcttagattctattacactggaagatctgtttgcttttttaagttttacagaagagtttagaaataacggaagctatgcaagagctagaaaaatcgcagcactaagatccttttttaaatacatttcaggaaaagctaaaataataaaggaaaatccaactttagagctagaatcccctagccttcctaaaagaaatcctatttatttaacccttgaagaaagtcaagcgcttttaaattcaatagatggtccttttaaagaaagagactattgcataataacattatttttaaattgcggtcttagattatctgaactagtaagtattgatatatcaaaaataaagggtgatactttaactattttaggaaaaggaaataaagaaagaacgatatatttaaacgaaatgtgcctaaaagctatagaagattatatacctgtaagaaatcaaaaagcttcatcaataaaaattgaagataaagatgcccttttcataagtagaaaactcactagaataaatcaaaggactattgaactaatggttaaaaaatatgctttaaaagctaatttagattatgaaaaactcacgcctcataaattaaggcatacagctgctactttgatgtataagtacggaaatgtagatataagaagtttacagcaaatactaggacacgaaagtgtatctaccacacaaatatatactcatatagatgatgaaaatttaagaaaagctgtaaaatcaaatccccttaataacgtaaagtaattacgtaatatatattatgtaaactaatatatatagaagagaagatgattacaaaaatcaccttctcttctacttattaagtctatcctttttaagtgcaaataatcctggcgatgtttcatttataaatttttttctcttatcctcgttatttaatatctcatttaatccatctacatcttctataaattcaatttcaatttccttgtgctcaccatcttctacataattatcatcgtaatcattcaaaatttcttcttctagaatagcttctgcattaacgggattttcgtcatctattatattgtcgataagtatagatctagtttttgcgttatctggattaaggcaccttccacaattgtcgcatattttatctggattcaaatcacatttatcacattcaccacaattagtacatttcttattttcatctaatacacaaatcttatccataaaaaactacccttctttagagttatttaatacaataaagtacattgtaccaaataatttacttcatttcaagtgataatagaaaatatcattttagagttatctatttttcataataccattaaattctttcaaacagaacataagtttgcatactatcttgtattatgctataatttaatgtaataattactataaaaattcttgcggggtgtgtaaagtggctacggataagattacaagagacgtgcaaagtgaaatatatgaatttataaggcaagaagtcctagataaagggtatccaccttctgtcagagaaatatgtgcaaaagttggcttaagctctacttctacagtacatggccatctttcaagacttgaaaaaaagggtcttataagacgtgatccaactaaacctagagctatagaattgataaaagatcctatatctaaaagagaaatgattgatattcccatagttggaaaagttcaagcaggtcagcctattcttgctgttgaaaatatagatgactatcttacaattccgttaaactttgtaagaaatactaatgatctttttatattaaaaatcagcggaaacagtatgattgaggccggcatatatgatggagatttagctattatagaaaaaacaaactatgctcaaaatggagatattgttgtagcattaatagaaaatgatgctacaataaaaaggttctttaaagagaaggataaaataagacttcagcccgaaaatcacacaatggatccaattatagttgataattgtgaagtaataggaaaattggccggaatttatagaagatattaaaaataagctgctttattcaaactaaagcagcttatttttttacattattaatttagaaagagctataagtactccaagtttagcatgatcaaaagtaagaccgccttgaagatatcctatgtacggttctcttataggtgcatctgcagacaattctatagaggctccttgtacaaatgtaccagctgccattataaccttatcttcgtagcctggcatatcccaagcttcacattgcacaaaagaatctactggagatgctgtttgaattccttttatgaaatcgataagcttcttctcgtcattgaatttaatagcctgtataatatctgtccttttatcattatatttaggaagaacatcaaaacctgcgagctccattattctagcgcaaaaaaccgcacccttaactgcctcaattgtaacatgtggagccataaaaagtccttcatataaacttctcattactccgaaagtagagccgcactctcctcctattccaggaactgtaaccctaaaggtagcttgagttacatactcttcctttcctgctatgtagccccctgttgtggctattccgcctccgatatttttaattaatgaacctgcaattatatcagcaccaacatctgtaggttctttttcttcaacaaactcaccgtaacagttatcaacaaatactattacattttcattaacttctcttattgatttaattatttcagcgatttcagctattcttagagactttctccatccgtatcctgtagaacgctgaatatgaattaactttatactgtcatcctttttaagttcttctttaacagtatttatatcaaccttaccatcttttaaatcaaccattttgtatttaacaccatattctctaagcgatcctacttttttactatcatccattccaattatgtcatgaagagtatcataaggcatcccgcaaatagacatcatagtatcattgggacgtaaatttccaaataaggctgcacctattgcatgtgttccattaacgaaatgtggccttacaaatgcactttctgtattaaatatatttgcatataccctatcaagtgaatctcttcctatatcattatatccgtagccacttgaattagtaaaatgagattcacttattctttcttcttgaaaagccttaagcacctttaactgattatactctctaatttcatcatagtacttaaattccttttcaacatcatttaatgctctttcatataactctaatactctttcatttatattatacttattcataagtgatcttttagtaaattctagcataaatcttgtaatcctcctgagtttatttaattacacactcaaaaaagaggcaataaaaaaacttgcctacttttcttataatttattcttcatcctgctgaggctggttaaatagtatcggtcttaaaggagttatggtggatacagcatgtttatatatcatcatctgttttccatcactttcaagtattaccgtaaaactatcaaatcccttaacactacctctcatctgaaatccatttgtcaaatgaattgcaacaggtatcttattctttctcgcactatttaaaaatatatcctgcaaattatttgttgacttgttattcatgatactcaccctccgtttattttacatagttaatattctataaaaaactttaaaatccttttaaatttcttctatagaagatagaattttaaaaactatatcatcatcatttttatatatgtccttatttatccataccgctctttcatcttttctaaaccaagtaagctgtctttttgcatagtgtctactgccctttttaataagttctacagcttcttccaaagtaatgcagccttcaagataagaaagaatttccttataccctattcccttcatggattgcatatttgaattatagcccatatcccttaattttataacttcatcaacaagaccatttcttaacattatgtctactctcaaatttattctttcatataacttttgcctatccatatttaatataaaataatgtatgttatatggtatatcgtacaaatctacattactatttagctcacttatagtttttccagttattttataaacttcaagagctcttattaccctttttaaatcgttaggatatagttttttatacgaatctatatctatatttttgagcttttcatgaagatactcttttcccttatccttagcaatagcttgaagagattctctgtaggcttcatccttataagccccagtgaaatcataattacagattagagaatttatatataatcctgtacctccaactataataggatatttttttctggaagttatatcatctattgcattttgcgccatctttttaaagcttgcaacgctaaattcttctgaaggatctaccacatctattaaatgatgttttattcccttcatttcttcttttgttacttttgctgatcctatatccatgtacttgtatatttgcattgaatcggcagatattatttctccattcatcttttgtgctatttttatggatatatctgttttccccacagctgtaggtcctgctataataagtatatctttcatactaaattcatcctcgattgactttattgaattctcttaaacttcttttcaaaatcagttacagttaatcttacaattgttggccgcccatgagggcagttaaacgggtcttcagcaaatcttaaatcctgtattagagttttcatttcatcatgtgtaagctcatgatatgctttcacagctgatttacaagctgctgttgcaatgcttctgtattttacctctgacgtttctccacttcccatgttctttagattatctattatttctaaaaataaatccttaacaagtggcttacctaaaaacaaaggaacctctttaatagcaacagtattatcaccaaaatactcaataacaaatccagcatttttaaatacttctttattttcgtcataataaataaaatcttcagggagtaattccactacagaaggtgtaattaaaatttgagaggacacacctttattttttatatcttccctatatttctcaaataatatcttctcatgagctgcatgttggtctattatatataattcctcaaagctttccgctaaaatataagtattattgaattgacctatgaccctaagctcaggaaattttgctttcttattagtaattatatcataggtttctttttcttgggaagtttcttttattatatccttctctctaaaatcgtcaaaacttctatccttattttcttttgtactgttatcataattttcaataggacgttttaaatctattggaatttgtacaggtaccggaaatgagtctttttttatataaccatctattttatcatcatgtttaatctcattttttgtaataacgtcttccttaatatcaaacaatttatcttcttcttcttttagagcttcaaccttgaaagattcctttaagctgtttctaatgccttcatgtacggtatcaaaaataattttaaatatatccctttcattttgaaatttaacttctgattttgtaggatgtacatttacatctacaaattcgggaaatatatctaaaaatattataaaaaaaggaaacttatttatcatcataaacgatttaacagcgttttcaactgctgcagttatgagtttattctttatatatcgtttatttataaatatactttgattatttctgcttccacgacttatttctgcatttcccacatatccatgaacagatactaaatctgtatgacgttcaaagcttatgacattatcacatatctttttaccatatatagctcttatggtgtctattaaattatcagtagcatatgttgtgataacccttttaccgttattaattaatctaaaggatatttcactatgagctaaagctaatcgatttacaatatcagaaatagaagatgcttctttagctgtagattttaaaaatttttctcttgctggaacattgtaaaacaaatcacgtacttctatatgtgttcctatgttagttccacagtccttaatgtaatcaacacttccaccacttattgatatttctcttccaaattcgttctctttagttcttgactttaatgtagtctttgacacggaagcaatacttggtagagcctcccccctaaatcccaaggtatttatagaatatatatcctgaagctttgatatcttacttgttgcatgaggcataaaagctttttctatatcatccttatctataccatagccatcatccaacaccttaataagagttcttccgccattttctatttcaatattgatagttttagcgcctgcatcaatactattctcaactaattccttaactacagaaaatggtctctctaccacttctcctgcggcaattttattagaagtatcttcactcaaaatatttattctcaaaatctcaccttcttattcttaaagttttttggcacgctttataaattcatacagtttattcatacattctatcggattcatatccattatctcagtatctttaagttcctttaaaatagattctctttcaaggtaattaaaatcaatctgatatgaatctttttttggttcttctttaactatatttgtttttttgtcttcagtattttctgctgtcttaggcttagcttcttctaaatccttaagtatttcccttgcacgcactaagacttcttcaggaagacctgctattttagcaacttctataccataagattcatctgcaccttttgaaattattttccttaagaagattatatcatcattcaccttttttacagcaatagaataattcttaagtccttctatttctccttcaagcttagtaagttcatgataatgggttgcaaagagtgtcttacattttaaattttcacttttacatatgtactctataactgaccaagctatactaagaccatcataagtacttgttcctcgccctacttcatctaaaagtattaagctatttttagttgcatttttaagtatgtgagatacttcccacatttcaaccataaatgtacttttacctgcattcaaatcatctgatgcacctattcttgtaaaaatcttatcacatatagatatttcagctgcacttgccggtacaaagcaccctatttgagccatgagaactataaggccaacttggcgcatataggttgactttccagccatattaggacctgttataagcatcattacattatcagaattatttatcacagtatcattagctacaaaatttccactagctataactttttctacaacaggatgtcttccttcctttataactaatgttccatccctttttattacaggtttacaataattattttccctagctacatcagcaaaagagcagatacaatcaagctctgatagaattttagcgcttccctttattctatctatttctttttctattctttctcttatttcacaaaaaacattatattctaaaaggactagcttctcttcagctccaagaatcttttcttccatttccttaagctctggcgttatatacctttcactattagtaagtgtttgctttcttatgtatctgccttccggaaccaaattcaaattagatttagtaatctctatataatatccaaatactttattgtaacttactttaagagattttattcccgtaacctctctttcagtgttttcaagtgaagctatccactgctttccatgagatttagcaagtcttaattcatctatatccttattatatccttcttttattatatttccttcttttatagataaggaggggttgtcatttatcgattcatataacaatttataaatatcacctaaatcatcaagtgcattttccatattaactagaagctctgaattaaagtttttaataagcttttttatagctggcaatttttcaatagaacctcttaaagatatcatttcttttgcattaacgcttttacttgatatttttcctgccaatctttctatatcatatacctgttttaacaattcctttaaatcttcattatatgatacattagttaacatttcttcaacagcatcaagtcttaaatttattttttcatcatctatcaaaggtctttctatccattttctaatttgtcgtccacccatagccgtacttgttttatcaaggacccaaagcaaagatcccttcttgctcttatctttaagcgtctccgtaagctctaaatttcttcttgaatttatatctatacttaaaaagtccactatttcatatttttgaagttcatctatatgagttaatgcagtcttttgagtatctattatatattttataagaccattagcacaactttttaatccttctgtcatattaacttcggcataattagaaaattgagcttttaaattttcatttctatgctctttaaaatattcgttactaaatctgttataaacaacatcaaatctttctcttattttatctactagtttatcatctaaattctcctgaagaaccaattcttttggtgaaaattttgatatttcattcagtatgatttcgaaatctaattctgtctctgttaagttaaattctccggttgatatatcagcaaaacacatagctgaaactttgtcatgtataaacaagctcattatatagttattctttgtatcctcaagaaaagaggaatctgtatatgttccaggtgtaagtacctttataacatctcgttttacaattccttttgccaaagaaggatcttctagctgttccgctactgcaaccttatatccttttgaaacaagtttgctagcgtaaatagcatatgcatgatgaggaactccgcacataggagccctcttttcaagtccacaatccttacctgtaagaactaattccagttctctagatgcgacttctgcatcctcaaaaaacatctcataaaaatcgcctaccctaaagaacaaaatacaatctttatgattttccttaatagataaatactgttgcatcataggagatatgctcatctttaatcatccctcaatcttatagtaaatttaaacttcttcgccaactaaagaaaaagcttgggcctttgttatttttacatttataagttttcctatagaactctccagcccttcaaaattaacaagctttcctgtccttgttcttcccatcaatttactaccatcattcttgctttttccttcaacaagaatctctacaatttttccttcatattctttgttctttttttcgcttattaggttaacagcctcaagaagtttgttaaatcttttgtgcttaacctcatctggaatttgattttcgtatttagcagcaggagtaccctctcttatagaatataaaaatgtaaatgctgaatcgtactctacctcttttacaagacttagtgtatcttcaaaatcttcttctgtttctcctgggaaccctactataatatctgtagttatagctacatttttaatcccactctttattttatttacaagatttatataatcttctcttgtataatttctgttcattttattgagtatagtagttgatcctgattgaactggaagatgaatatgttcacacaccttatcacaatcagctatggccgctatgacatcatcagttaaatccttaggatgagatgtcataaatcttattcttaaaagtccttctatattattaagtcttcttaagagtaatgcaaaattcatttcttcatctaaactctttccataggagttaacattttggcccaaaagagtaatttctttatagccctttttaacaagttcttttatttcattttctatgtcttcaggtttcctacttctttctcttccccttacatatggaactatacagtaagtacagaaattattgcatccatacataatggttacaaatgccttcatatcatagcttctatatataggcataccttctacgatgccttcttctttatcccatatttcaactactgaagtcctttcattttcaaccttctttaaatattgaggaaacatctgagtattgtgagttcccataactatatccacaaaaggaaatcttttctttatatgctctgccatatccctttgctgcatcatgcatccacacacagttattataagattaggctttttatcctttagctttttaagagtacctaaattgccatataccttaagctctgcattttctctaacacagcatgtattaaatattataagatctgcatcctctctattgtctgttgcttcatatttcatttccttaagcattcctgcgagcttttcagaatcttctgcgttcatctggcagccccatgtttctataaaaaatagtttatttttatccataatttcctcctgatttaagcttacgtatattatttgtaattataaaatgtcagttaaatattatatcatacatttatcaataaaatcaaaatatataaaatttaatttaagtttttgaataattaatcataaaaatgaaaataataatactgaaataaactaaagggggttttttatatgtatgatgctaaattgttagaaaacaatgataaacaagctgaaaaagacttgattagatgcaactgcatatgtgatataggttacttcaacaatcacaggaatattaaattagttaatacaacatcatatcatgtaccaactgaaggaatagttaattttaaataataaaacctttataaagctttataaacccttaatacacttatagggtttacaaataagttgcattttacttgtaaaccctacatttttaataaatttattattatttattcccatccttttcaagcctaagatattcaatttcctttacaaaccccatacttgtatataaatttatagctggaacattgttcatatcaaccttaatatatacaactttgcatcctctattcttaagtatattcaatatataacttaaaaaatatctaccatatccatttcctctatattgttcaactataccaaaattcactattgttatattattatgttcaaagataaattgaccgtatcctattttaatctcatccttgcttataaaaaaagctccatcatctacataatactcttgtgcttcatcgtagtatatatcatcaatagaaagaggaatccgtccttcagcatcaaaaactttattttgaatataacaccgtatattttcatcacgcgacttttgaaatttttcaatagttattccttctggtttattaactaaatcaagcttatctaatttcctttcaagttccatattccccttaaccacgttaaatcctaggtttttcatcacgaaataattgtattcgtttttttcacacttatataaaaatttatattctgtattaaaaaattttgttaatgttctacaaatgtctttcttgaatccatatttcttttcaatatacatggactttatctccacagtatccctatttttcttttctagccaagtatatcctacatattctctatcaaacttcaaaatgttaacattctttcttataaaaaattttcttatcatggatgtcttattataaacatcaaaaaaatctttatttaaaacattaaaaccctttctttttttattaaattgtataaataaacttaaatttttatcatttaatttttcacaagtaaacataataccctcttattatatttattattaattaaagtatagaatttataaatttttatgtcaattaaaatttgtaaattctttaatatcatctaaataactaatatactcttcaataaaactttgttcacatttattatttaaaacaattttattgagcttatttatatatttattttccgaccaattcttatgccttacatacctttttttgcctaacttccaaaacttatgaggaaaagctattaatgccagcattacttccatttcatctttgcttaatttattcaccgaattatatgcttgtattatttgctttgctttttcaaaattccacatatactcttttttagtcattaacgttcttatcattttgcataaatctgttataggtaaatcaataattatactgtttaaatgtattatatagtagtcctttttgcctttaattatattctgatagtaaaagctgttatgacatacagtttttttgttattagaaccttttataattttaaaataagaagactcattaagtatttttatagaaaaaagtcccctattataatagctttctataagatcttcatacataaaatcaaacttattctttattcttttattttgtattatgcttttaaagctttccatatcacgaaggcactttgcaaaaatctcaacccaattcttcgaattattatttttaagtttaattttatgaaaatttatgttttgagttgctaagtgaaattttgccaaaagctttgaagcatttattgcttcatttatatcatttaaattacattcctcaccatcaacccattctgtaagatagaatgcaaggttcttgtaaaagactattagtttaccatctttagttgaaatgtaatcagctatattgttaaaattattttttttaagttccctaactaaataattcccattttctacttttttaaactcatggcttaccttctttaaacaaaccgttgagttttctgttttaatcttatatatgcttcttattttctttatatcaactaatttcatttcatatctatttagaatttttcttatcatttttaactctttatcttttattcctacaattgaatcctcagtttcactcataatatctcctcccaaaatatgtacataataaaatatattatactcaaataaaatttatcacctagaaaatctcttattcgtataacagcaaaaaaaatcgaaatggtatcgccctttcgattcaaataaaaaactatgctattttatttacatgtcatctattttttagatcctctaaagttttcataagtttttccggcataggaagccctaatttactgcagttttctaaaatatttatgccttcatttgctacgtaaaaataacatgtaaatgttctaaaaaaccatgttcctttgttaacaagtctatccattagaacagatactataataaccactaatacagatactatttttgcaatacccatgtaactttttttgaaatccaaactcttttctacggctgcatttactatatcccctaaataatctattaccataaaaaatattagaaccattaaaggggtatcccactgaccaaacatgtagctggacatatcttgcatgcacgcaactataacacctaacattcctttcacctcctatttacttacaaggtattacttcttatttaatgtatggttactatatctgcaattctattatacctaatagcgcaaataagcgcaaacgaaacacatgtgttttatagtgatatagtgagaataagtttaatatactcattttttcaagatttttgaattaatattattttgaataggatgcgcaaatgtgctattatgtgcatagatgaaaggggtatagcaacaatggagttaatggagttactaaaaaatgatcgaattaacaagggaatgacacaagaagagtatgctagaatattaaatataactagaggaactttatctcaccttgaaaaaggaagatcaccgagtgcagaaacagcaaaaaaaatttctaactatttcaatagacctatttcagaacttataggacataaaaaaataaaaaagctttcagaactagaaacaacgaatatgcttataaattctttgattaaaaaaaaggaaattacaaaagaacaaataagcgatgaggccaaaaaactcatatgggcgtctttagaattggaaataaaattaaaacttgagatgaaagagaggatttagttctctcttttctttttttcactagagtctttcttaccttttgttaatgaatcttggattttcaataattctaatataatctggtcaatttcgttcatatgtaacactcccaatacacttaaaattcttcaacaaataaaattcaatattttcagagcacatatgtgtgaaattaaatgtttatagcataaaactataacaaaaacagacgctagaaagaaataaaacgatagtgcggatgtaattcactttagaatatagtttataatcagaatgtgcttttttattattgcaattgaacttttttctatccataccattattatacatctaggacgttaattttcaatagtgtaatttttaagttttaattaatttgctaaaagaacgtctctgaaaactattacattattataatattacaagaggaacactctctattcctaaagtttctaactaatttatataaaaagcttaaataattatatttttattattataacaaatgttaaaacatgaatttacaagattgtatgcaaattaagatatacttatttgttacttataccgatgaaacttatctagttatattataatttttgcaactatcatacaaacagttttcagtaatggtgcacttttacacttatttataaaaaaatccaaaaacatcttaaatccacttagagatgtgtttataataattgtacatctttacaaataaaatgtaaatattgttttttacattttttaaaacgagtactcctttctttgtaaatacataaaaaaaaagaatatcagaactaaattctagtaagatattctttaaaaaaattatttgtttccatttgaagttaaagaatatttacgcagtataaatatctcaactcttctatttctagctctgccttgctcagtactattagtttcctctggtgaatattctccgtatgcttgtattgaaaatctcttttcatcaacaccaccactagtaaccataaatttcattacatttaaagctctagaagcacttaattcccaattcgaatgaaatgtttctgttgctataggtatattatctgtatgacccgtaactttaatattgttatctagactatgtatcattttagaaatctctatgagcataggctgaatatttgctaacacagtagagtctccagacctaaacaggataatatcttgtatagaaattgccaatccttcttcagttatctttgattttatcttatcagtatatccattttcagcaactttttgatctatatttttctttatctcattcatcatatcttgttctattttactattattagattctgattgagcattacttggtgtagactctttcattgaagagactacaccatttccagtaccactttcaaccaaaacacctttaccgctagaaaagatagcactaaattcttggctcattttctgcagttttttattatcaaccttactcatagcaaacataactataaaaagagctagcaaaagcgtcaacatatctgcatatggaattaaccaagtctcatcaacatgttcttcatgatgttctttcttcttcttactcatggttattctcctttgctttgaatagattgtctttgtttaggagataaggttccaattaattttttctcaatacttttaggattatttccagattggatatctaaaataccttctgttataatacgcattacattaatttcttcaagcgatttcctttttaatctagaagcaaaaggatgacaaataacatatccgaagaagattccatatagagtagcaacaaaggctcctgctatcatgtgaccaagtttttcagtatcgtttaaattaccaagagcacctattagtccaacaacggctcccaaaactccaagtgtaggcgcagcacctcctgcagttgtaaatattaaagcacctccacgatgtctttcttccgtactctcaatttccatttctaaaacttcagctatatgttgagggtcaacgccgtcaacaaccatttctaagccagtttttaaaaattcgttatcaatagagtgaattttgccttctaatgataaaagaccattctttctagtttcttgagccatatccacaatttgatttataatttcaacaggatcctcttttgattttcctctcatcagagatttaaaaacctttgggatgttagtaaattcatttttaggaaatgaattcattacagctgcagaagtacctacgataattattattgcagctgctggatttaaaagcacagcaacatttgcaccttttacaatcattcctacaacaacagctaaaagtcctgtaataatgcctattacaagaaaaatatccatccagtatatccccctttaagcataaagtaatcgataatttcatataggcttatcatatcatatggagtatgtagccaacaagacttttatcgacatatttcaacaaaactattggggtaaaaactacatattggatatcattacacaataatgtctgtgtatataaattttttctaaaataaaaaaggcagtttctgttattttaagaaactgcctttaagctaagtaattatagttttttattcttcaacttctcttatgcttaaacctatcttcttttcttctgagcttacttctaatatcttagcttttatttcttctcctacattaagagcatcggatggttttgctatccttttatggcttatttcagaaatatgcaccaaaccatcaactcctggctcaagttttacaaatgcaccaaaatcagcaaatctaattacttttccaagcactacagaaccaacgggatatttctcctcaacattgttccaaggattctcagttaatttctttacacttagagataattttttgttttctttatctacacttaaaacatatactttaatcttatctcctatcttaagaacatcagcaggcttttcaacccttccccaagatatttcggatacatgaagaagtccatcaacaccttcaatttctacaaaagctccaaaatcagttaatcttttaacttctccctcaacaacttgaccttcctctaatttgttccaaacagtctcttctactttttctttttccttacttaatagtgctcttctagaagctactatctttgtttgtcttttcttagttgaatattctataattgccacatcaaagctttttcctatatattcttttagattatctacatgaaataattctacatgtgaagctggaataaatattcttattcccttataagaagctattattccgccttttacatcctctttaacaacaacatttaaagttgttttattttcaaaagcttctttaatttctttatatccttgctctctttgaagctctttaacagataatactacatagttatctgcatcctttaactttatgattttcgctacaattttgtcgccgactgtaaataattcttttaaatcttttccatcatcatctatttcgctttttggtattactccatctcttttatagtttatatttaaaaatacctctttttcagaaacctgaataatttctcccgttactgatgcacctacatatattttaccttcattttcagctatgaatttcattgcatctgccatttcattatttgtttcatttgaaatttgattttcactcattttactaattgcctcctcaataatccaatcaggtgttgaagctccagccgttacacctattacacaatttttattttttaatatattctcaggtatttctcctgaattttctacatgaatagtttcattacaattagacttacatatctcgtacagcttagttgtatttgaactttgttttcctccaataacaaccatgaagtccactttatttgaaagatcctttgcaattttttgtctctctgatgtagcattacatattgtattaaaagatataacttcaattgctctattcttaacttcctttaaaaccttttcccagttttcaagtttttccgtagtttgagaaacaatgcaaacctttgattcagatgtaatattctctaaattttctccttgctttgaaattatagctttattatcacaccaaccattaatgccaataacctcagggtgatatttatcacctacaattactatatcgtatccaagttcattatatttttttactttttcctgaattttagttacaaatggacaagtggcattaattactgtaagtcctttagataaaagtattttgtatatttcttcagaaattccatgagatcttattaatataacatcgttttcctttagattatctatatcttcaattccaataggatatacattattatccttaagtttatcaactacatcattattatgaattaattctcccaaagtataaatttttttattatattctttttgagttaaaagtgccatatcaacagctctcttaaccccaaagcagaaacccgctttttcagcaagcataacctttctcatttatagacttaaccaccttagcttttctatatttttttacttatatactgaacaatataatctacaacttcttctatacacatattagaggaatcgatttctacagcatcataggcctttgtcaaaggatttacttctctgtttgaatcaatataatctcttcttattatatcatttaatatatcatcataacatacctttatattctttgctgacaattccttgtatcttctttttgctctttcttcaggtgtagctgttaaataaaatttaaaaggtgcgtcgtttaaaacaactgttcctatatcccttccatccataacaacatcatatcttccagccatctttttttgtaaatatacaagtttttcccttacttcgagtacagaagcataatctgacacattttggctagtttttggtaagagtatttcttcactcacatcttcaccattaactattaacttgtcattttcaaaatgcatagaaagcgattcaataagatcacataacttttttacatcatttgctcttatattttgtctcatagccattaaagtaactgctctgtacatagcacctgtattaatatacataagcctaaactttttagcaaccagcttagctatagtgctttttcctgcaccggcaggtccatctattgctatatttaatctcaatttaattccgcctttcttttagctgcaagatattataaaataattattaattgttgaaataccattaataatattctatacaaaccaaaaaaatcctttatttttttctacaaaatatatttttttatgttttttcttgcatattttacattgtcactgtaaaagttttcttgaagtctgtcaatttacatattataattcattaattaatctccaatatttctaccagcttcatgagctgttgacattgctatttgtaaattaaaccctcctgtataagcatccacatccactatttctccgcaaaaataaagattacttaccttctttgattttaaagtagaagggtctatttccttaacatccactccaccagcagttataatagcttctgtaataggtctaagtccttttattgttatagtgaattcttttataagatttactatcttttttctctcttccttagtaattaaattcacttttttatcttcttctattttagataattttataattactggtattaatttttgaggcaataaatcatctagtgcatttttaaaatctttatttatatacttcataaaatccttctgaatacgtttatccagttctttttcatcaagagctggtttcaaatctataacagctttaaggtcattattataattcacaactctacttgcacttaaaactattggacctgagataccataatgagtaaaaagcatttcaccaaaattatcatacaaaactttctttcctttttttatatataatgatacatttttaagtgaaagaccttgaagatcacttataaagctttctctaatttctattggaacaagtgatggtctaggttcaactatgttatgtcccatatctcttgcaaaattatacccatcacctgttgaacccgtctgtgggtatgattttccacctgtacacagaataaagaaatctcctttgaaacattcattattacttgtagtaacactttttattacaccattttccaattttatacttactacccttgaatttaaaatcacttttacatttctcttttttagttctctttctaatgccaatattatatcagaagatttatctgatttaggaaaaactcttcctccacgttcaacctttaatttcacacctagtccttctataaaatccattaaatcattattagtaaaagaatataatgaactatataaaaaatacggattaccaggtatattttcaaaaaactcatcaatagatatagagttggttatattacaccttccctttccagttataaaaagttttttaccaagtttctcattccgctctattagaataacctcatgtttttttgctgctgttatggctgccatcatgccagcagctcctcctcctactacaataacctttgacactaaatcacctctaaagacttaaatttaaaatttatcatcagtacttctagacgaataaactttatatcgtttccaaatattttctaagtcagtaaacacattagaaattctatctttttctctaagaccaactgagacaataagagcatttataacacttaaaggagccacaagagaatcaacaaaggatgccatattactttgagctataagagtatagtcagcctctgtagctaatggtgatagaagactatctgtaagtgcaactaccttagtttttctagatttagcgaagcttaaagcttctatagttcttgatgcatatcttggaaaacctatgcctataagcaaatcatcagaagttatatttattatttgttcaaaaatatcgcttattttgtaacttacaacatatacattatctaatattaaattcaaataaaagcctaaaaattcagcaagtgctgtagaacttctaagaccaattatgtatattcttttagcagaaaatatactatttacaacgtcatcaaaaacattatgatttattttttcaagagtaacgcgtatattctctatatcagctttaagtactccttttaaagaactctcctcagctataaatgtgttggataattctattctctgtactgtagtaagcttattttttatgagttcatgcagtgctttttgaagtttgggatacccactaaatccaagttcattagcaaatctaactactgtagattcgcttacacctacacttacacctagtcttgcagcagtcataaatgctgctttatcataatgcttaagtatatactcagctattaatttttgtcctttacttaatcttggaaacttaatttgtataattctcatcaagtcgtatttctcgtcttccactaataccaatcccttctaggattacaattatgattgcaaccataaaataaatatgaattttttatttcattttagcatttaataaaagtttattcaagattttatttatttaatataaaaaggcaataaaatctcgaacatcataattataaacttcttaaatattctatctcttctttatttaacattcttacatttccctcttttaagtcacctaattttatatttccaatagaaattcttttaagttcctcaacaggaaaacctactgcagcacacattcttcttacctgcctttttttgccttcatgtataactatctttaatatagaattttttccgtcaaaggataccacggaaacttcagcttccttggttatatatccacctatatctattccctttcttaaggcatctaaatgtttaaattgaggtttacccttaactgttgcaagataacacttatttacattttgtctaggatgcattatcctattaaatatttctccatcattggttacaattaaaagacctgttgtattaaaatcaagtctacctaccggaaacactctttccttgaaattcaaaagatctataacagttttccttcctctgtaatcactagccgctgttaaatatcctttaggcttattcaaaattgcataaacctttttatcctctaatttaatttccttattatctaattcaattgtatcttttttataatcaaccttaaaacctaattctgtcacaatagtaccatttacttttactcttccatcctgaatcattttttcacattttcttctagatgctactccacattcagccatatatttttgcaatctttcttccatattaaatcacctgttatctattactattctttatttatatatatttaaagccattttttctttctaaaatacattaacataaatgcagatagtgatatcataatcacccaaagaacagcatatccatatctgaatttaagttctggcatataatcgaagttcataccatatacaccaacaagaaaagaaagtggtataaatattgttgaaaaaatagtcaaaaatttcattatttcattcattttgttactagcactcgataagtatgtatcaagaagtcccgctatcatatctctaaagagctctattgtatctattacctgcacagtatggtcataaacatctttaaaataaatacttatatcgcttcctataatttcaacttctcctctttgaagcgtatttattatttctcttaaaggccaaactgctttccataaaaatatcatttgtcttttaagattatatacttcattaaataaattatttgtggcagttgtcataagagactcttcaaaattttcaattttatcttcaaccttttctaaaatcacaaaataattatcaactatagaatcaattaacgcatatgtaagatatccaacccctgtttttcttattttacttttagtatttctaattctgtctcttaaatttccaaaaacatctccatccttgccttcttcttgaaaagtaataataagattttccatacatattatactaacctgctcaactacaagtttatcttccctaaaatatatcatttttaaaacaataaaaatatatttttcgaactcttctattttaggtctttgattagtatttagtatatcctccattataagtgaatggactccaaaatactttccaaccttttcatataaatctatatcttcaagtccgtttatatttatccatgtcatattatctgtatctctgtattttaagcactcatcaatactatgaacatccttttcctcaaaataatcatccttataatcaataatatgtatttctgttttttttcctgtagaatttcctacatgtatcaaactgcctggctttaatcccttctttttagatactccttttgtatatctagacatattaaatcacctaactgtaaattattttatttatataatttttttctatgttcttataatttccactttaccgtgaaaccttataagttatcaattattttctacaatttatattaacacatagataaactacttaaaagtgcagtataataaaaatacatcaaaagtacaaataggagatgatcattatgaaaaaatctaacgtatttttaggagggcttttagttttaataggaatattagctattcttcaccaatttagttatttaggctttatctcatcgagatctatggtaggatttttattattaataataggagtggcttttgatttaagctattttattggcaaaaaaaattctagtaaccttatagctggtggtatattattaacccttggaatattctatattggtaaatcatatttttatttatatgctctatctgctgtcacttggcaaatatacactttttctatagcagttggattatatcaggcctatatatttgcaaataaagacaaagggactcttattgcagctactattcttacagtggtatcaatcttttcagcagtttcaaatatatttagaataatgatgcctatatggtttaatagaagttttatatttccaataattttaatattagctggtatctatatattatttaaaaacttcagaaattgaggagatgcgtaaaatgactggtgataaattagtttatgatggttggcttaaagtctacaaaagagatgtgaatggaagaacctatgatatacttaaaaattacgatgcagtatcagctttcataacaaatgaatttgatgatgtattgatggtaaaacagtttagagccgctataatggatgaaacccttgaaataccagctggttgccttgatattgcaggtgagtctcctgaagactgtcttattcgtgaaataaaagaagaaaccaatttaaaaatagacaaaataaatttgaaaaaaataatatcctacaaaccaacattaggtttcagtacaagtgtattgcatctttatcatgcaaaaataaagaagtccgacttgatttctaataaagttaatgatgaggatgtaaatgaagtgctatgggtagataagaatacttttatagaatatataaaaaacggcaaaatttccgatggaaaaaccataataagttatttatatcttaggtgtatgaaagcaggactttaattaaacgtcctgcttttttattaaactaaactttatcattaaagaaatccttctgagtataagtcatatttttcttttcaaccttactttcagctgctctattaaaagctttatctgcttttacttctttagttgctgtatcgtttttcttaatattatttcttctactcattttatcctccttaataaaaagttcattaaggttattatgtgttaattttttttgtatatacaaaaaagcttttctaaatcacttttataatcctctctttttatgtcatgatatgctggtgaaagtttctttttagacgtattataaacatgaagatttcctaccttagactcattaatccatatttctatcattccatcacaagaattaaatacacctttaaaaatgctattatatcctctatcatttagaaaattcacaaaattctcgcaaaaatcctttaattcttcaaaatacgaatcagaagcgtttggtggcgtaagtttatttattacatcttttctattatctaaaggatattcttcttcaagcgttcccttctttgcaagtacatctgcagcatcattccactttatacctgtatgactttttaccttaacccaatttatatcaattgtgcacttctctataaattctttgaattcctgagttaaaggtttatttgccgtatagtctcctttagcccatttttctatattttcaaaatcgtaatatacagttacactatgaatattattttcatcacaccaagtaagagcatgttccactgcctttatttctccaccaacctgtctagatcctgttgcataagtttcgcaaactctaccatagatcttctttatacactcaccattctttaaaataacagctccgtatccaactttgtcatctaaatatgaaccatcagaatatattttaaaattgtccaaccgcctcacatacctttcaaaatcctatttagcccattcgttgtttacccattctcctctgttaaatagtatatctttataaggctctaaagtttcaaccacttcattttttagtttttttacttctccgcattttttaaccaatgataaatcacccttagcaccggtaagaacccacatcagctttttaaccttaggtctaaagactaactcctgttctcccataccatcagtgaaatatattaaaaaacaatcctccattctgttcttatgaagatattcaaaaacaggtgaaaaacttgttcctcctttggtatctagcttttttttcatgtcccttggtttacttaccctatacattcttctaacaatattatcacattctattattgtgagctcataatttttattttttaatatatcgaatatttcagtcatcgcagcatctatttcagcatctgtcatacttccacttatatcaatagcaacaactattttaattatatggtctgacagttttcctcttaaatccattctatagggctgacgtctatcttttcttgttattgtttttttatatccctttggtagagtaccaatagctttttttaaatacatttgccaggatatttcagcttttttattcatatcatcaagatattcttgaactcttttaggaattcttccctttgctgaatttcttataattttattttttagctcatctatttggttttcataacctctgttatatgattcactccaagttttatgaatattcatttcatcaaaatttttatatatcttactacttcctttaactccatttatcttatctttcttttttttatttatattttcctgtataacttttacataatactcaagcggtttgtcatatttaagttccgttatattatactccaatttaacattttctatatttaaagaccaaggtggaagcgaattgatatattgatttattgatacatccatacctgtatttatggcaagactgctatattttttgctaagcttttcggctctttttatatggttatacattatatgataaatttcatgttttataagagccttcatttcacttatagaacagtttaaaaatatatgagggttaaaatacattgtaaagtatgatagtgatgctttagtttcacaggcagatgcaatatcttcccttatatctctttttatttgtatcaaaaatagagcaaaaaaattatcttctccattcattagatcgaaatttatttcttcaataaatcttaaaaacttttttctaaattcttctgtgaatttgctatcctctgtttcattaagttctctcaaaagatcttttcttacatcatctatagtagtattcaatttaatcaatcctctattccttcatacatgagaaaaaagttctctaaaaagctagtattctccaaaaactccttgtacaatttttttgaagaatcactctttatattctgcattattccaagcttaagatcatttggataaaggcttaaaaattcagaaaaaatctccacctctctacttctatcctctttattttcaagataaaataaaatatttttagctgatagaaataatctagaatgactttcttttcttatcctatcctttatatcttcacttatacaatcatttgcaaatatatcttcaggtgttaaaagagggctcttactttcatctatataatttataaaatcttgagctattgaagtacctacatttccacgaatgagattataaaatatatttctagatacctttgttttctttttaatataagccttatagatattagaaactctctcccaacttcttggagttgcctttattgattcctttgaattaggtgtactcaaatactcaggaaaactagctataaatccaagtatatcctcatgaattctactttcaccgtttattctttcatgtccccactcaatccaattattaacatctgattcaagataaatccatacaaatctatcttcttgagctggatccatatcatttacttgataatcactttcttcaaattcatcatatttactagacggattcatagccgcaataacagtaatattgtcctttaatttatatccatttatttctctatttaaaattatattcattatttcttgttgaacactatgctcgcatctatttatttcatctatgaaaagaagtactttttggtttggattattttttaagatctcatctattttaataaacttataataagcagcatataccgtttttttaattagtgatttttcatctccatagtcttgaactacaggaagtccaccaatttctccttcttttaataagttaccatctatattaatgtaataatactcttcatctttggaaagcttttttactaatgaagttttaccaattccactttccccaaccaaaagaggtactgctttagattctagaacaagttttattccttccaatgcttctttaaaattcatattagcactccttacattgacaatttataatctaccgtgtacatttttgcttttttacttccatacttatgtataaattttattttatctatatttattgctgaagtttccaagaaatctactatatattctctgttaatttcatcactcgccaatttatcgcataaaatacttttcaatatatcttgattttcaaattttatatattttaaaactcttacattgctttttacaagttcaattttctcttcttcactcatgtttcctatatacataactgcttcttcattttttttcgctgcaattctctttatctcaaaaggagcattatccatgtactttattgcttcccaatttaactctactgccttcatcattaccttataagatggtttttttatgtatctaatagaatcccaattagtttttaaagcttcaatttgtatatcttcacttggattttcaatatattgaatcgcccaccctttagctttaacagcactttcaatcacattttttgttggattatttataagttttaatgtattccaagccttcttaacacataaaatacataattcttcactaggactatctatcttttctataagccaaggatttttttgtatatcattaacatcgtacttcataactttttttagtcagtgctattttaagatcacttactaaactaaacctccttaaaataattaaatatttcgcacattatcatcttaataatgattatttgttgataatagtaattatatcatatatttttttcacttcaagtatataactagcaaaaaaggattcttatacccttccctcatattattttatactaaactcttctgattttaaagatacatttagtgtaacaattatttcaatccataaatatgttaatattgagacttgttgatattctcacatacactggaggtgcttatattgaattatgaaattatagactgtatcgacagcggaacagaatactgtccatgtcatcttgctgaatcaggaaactgtatactttgttctcagcttaacgggaaggatttctgtgactgcgtcaattggaaaggtgtttgcatatatcaggaatatacctggaaccacaataaagccaaaaaggaaaggagtgagtgtatttgtaaaataataaaaagagaagaaattgacaataatttaattgtacttacaattttcataagaaaaaaactagcagaggacttactgtatcctggaagctacgtttttttaagacctactaaaagctcaagatattacagctctccaatttctattatggaagcctcctctgacgaaaatataataaaagttataattgaggtcaaaggaataaaaacaaaaagcataaatgaattaaaagaaaaagatgacatagtattaaaaggaccttactggaatggtgttttaggattaaaaaatatacattcagctaaagaaggtatttctctcataatagctagagggattggtgaggctcctatagtacctataatgaagaaactatattctaatggaaataaggtagtagtcattgccgatagaggtaaatttaaagctaatctcatagataaatatcttgaagaattcagttcagaaacctataatttcaatactcttaacaaagatggagagcttcctgaagattttaaagatttcttgttgaattttattagatataataaggtaaatttaattcacatttctggccccaatatactaacaagcaaaatcctagatgttgtagatgaagatattaaaatatcatgttctaacaatgcaaaaatgtgctgtggcgagggtatttgtggagcatgtagtaatatttatgatgacgataaaatgaaaagaatgtgtaaggttcaaatagatccaagatatctttttaagggacttagaagtatttaattaataattatttggaggtaatttttaatgaaagttataattataggtgctggctgggctggagctgctgctgctataactgcaaaaaaggctggagcagatgttatagtttatgaaaaaaccgatatgattttgggcttgggaaatgttggaggactcatgcgaaataacggccgttacactgcagccgaagaattaattgcacttggagctggagatcttattaatataacagatgccaatacaaggcataagaatattgattttcctggtcataaacatgcttggtttaatatattgctacattaattattataacattataattacatatcattattacttatttattaataaagcatataaaatagcatttggtataatccaaatgctaaatgtttaactaatttgtaccactgttttccgttgtagttgttgtatttgaagtagtatctgtgctgtccgtattttttgttgtatcaacccgtagttgctgtattagcaatttttatagccacatctaaatcggtatttaatttatttaaagcatctaatcttgcttgcattttacctatcaccttatccatagaaattagtgcattattaaaatcttgtccttttacctttgcctgaacttctgaaacttcactgcttatttcacttgtttcttcaaccttattactatcaacttgaagtgtatctgaaagtgttataagagaatttatttcatcttcaggtaatgtttttttgcctgcctgaagatcaagtataattgaagataactgattttccttctgctcaatctgctgttttaatactatagtttgttgccttatctgtttcatttcatcgtgttttgccttcatctctgatttaaaggtagctatttcttgtgccttagtgtcctttttttcctttgcctctatcttttgattaacctggtttgtagtgcttggactaacatttttactttcaacttttactgcctgattggcttgtgatttcatttcctgcttttgttcctgctgcttaggattcacagcattactgtttttcccatgagcgtcttcattaccttttgcaaaaactgctgtaggaaatgttatagccaaagtcaatgtaagcactaataatcttcttttgttcatattatttcctccttgccatttataattttattttatataacttaaatcaatatcacttggatcttgaatagacttcaaagcgttattcatgttttttaatgcagaatttagcttctgattcacttgttttttttgttcagttgacaattgtactgaaggcttcacctctgacttatacgtaccagaattagaactgctactagttgtaatattagcatttttctttacatctaccaaagcgctttttgaagctttactattgtttttcaaactatctgaagatttattcgtacaagcagaaaaagttattgataataaaattagcattgctaatatttttttgttcatgtctttcctcctttttcaacatttttcgagctatacagtattattttcgtaatcttttctaaaaaatttattatgcttttaataattacaaatttatatttacaattattttcaaaaaaaaaaaaaaacaaatcacacttttaatatttactgcataaaatgtatttgatatttattttactagttactctttgcttttaatttctaggaatgcttaagtaccatgaaattatggattcataaatttattaatagctaactgattttattaaagcagttagctatattttaagttgattaatttttgtacttaagtatattaaaataccactactttgagctatccatagccttttttaattcttcaataaatttgttaatttcctctgagtctaatttcttctttatataagaaataaaataaagtgaagctcttttatgatattctgcctcattttctgctgttggataatatacttttagatgtatattcttattatctcccatagcatcacaacctcccttattctttatgcttaacagctacaattattctttatattttaataatagaggtgatattaaatgaaagtggcaatatatagccgtaaatcaaagttcacaggtaagggtgaatccattggtaatcaaatagaactatgtaagaattattgcaaagataacttaaaaaacataacagaatttttagtgtacgaagatgagggcttttctggaaaagatataaacaggcctaaatttaaaaatatgcttaaagatgcacaatctaaaaaatttaaagttttgatatgctacagattagatcgtgtaagtagaaatatatccgatttttattcttttattaatgagcttaacaaatacaatatcaattttataagtatacgagaacaatttgacacctcaactcccatgggaagagctatgatgtatatagcctcagtatttgcacaacttgaaagagaaactatagctgaacgcataaaagataatatgattgagcttgctaaaatgggtagatggcttggaggtcaaacgccattagggtttaaaagcaaaagaatattgcattctgataataaagccaaaaaaagaagtatatatgtactaactcctattagtgatgagttagaaaaagtaaatttaatttataataggtatattgagacatcatctgtaaattcaactttaaagtatctactttcgaacaaccttacagggaaaaacggaggggaattttctgccatgtcaataaatgatatactaaggaaccctgcatatgttatgtcagatgactctgttttttcatacctaaaagaaaaaggtattaatacttatggaatacctaataaaaatggaatattaatttataacaaaaaaaaagagcaatccaaaattaatgataccataaaatggatagctgctgtaagcaatcataaaggaataattgaatcttataggtggctgtatgttcaaagaagcttagataaaaactccaaaaagactacacctaggcaaggcacttctaaaaaatctttattatcaggtattttaaaatgtggtatttgcggttctcccatgcgtgtaagctatggaagaccaagaaaagatggtagcggcagaatatactactacacctgcaccatgaaagcaaattcaggaaaagcaagatgtaataacccaaatgtccgtggtgataaactagaagccattattctaacaaatttaaagaaattagataagaaaattttactgatggaattaaggacctatgctaaaactattactccaccgcttcctaaaaaagaattattacaaaaaaggaaacaaatgaatgcgcttcttaataacctaagtaaagtttcaaacacaaactcttcagaattcattttatctaaaataaataaacttggagaggaaataacgaaactagaaaataaattaaacaatttaaagaattcaaaacaatgtgattttaattctgaaatccttataagctctttagatgattttaaaactacatttaaattattagatactattaatgcaaaaagatgtatgttagaagccataatagaaaaaatcgaatggaatggatttaccaaaaccgcttatattaatctttggggttctaaaaataccgcaatataataaattatggtcatgcttggttatatgatgtaaacaaaatagaaccagaagtaaaaaaatacttaattaatatgggaataaaaataaatctattaaaaagagtaattgatgtgaaaaagactcaaaacaaattggagggaatcttcctatcagacggaagttatgttgagggtgatgtgtttatagaagcgacaggttcgacaggacctatgggtaattgtctaaaatacggaaacggatgctctatgtgcatattaagatgcccttcttttggtccacgagtaagtataagccaaagatcaggtatagatgatttaaggggcgaaagagaagatgatattccaggtgcttttagcggatcctgtaaaatatccaaagagagtttatcacctgaaatagtaaaagaacttgatgaaaaaggtgttgtaattctaaaggtaccaccagaagatataaaccttgataaattaaagctaaaagtatgtcagcagtatgcactaaaagaatttgctgagaatgtaattcttttagacacaggagatgcaatgtgaacaaaactacgacttttcaaaaatatttaccaccacaacaagtaacacaactaatttatataaaaatcttccagaaaaaacaattggagaaaagatctataaactaaggatgctacatggatatagcagacgtgaatttgctaaggtatgctctattggatatacaagtgtatgtaaatacgaactcaactactctcttcctcatcctaagaacctaaataaaatatgttctgcttttaatatatctatgtcttattttttataaatacataaaaaaggaggaatgatttccccctttttttctatagatctcttactttaaataatatccaacagctttattatcatcgcctccatgtataagtacggcattagcaatattaaaattagttggtacttcgaatacaatgtatgtttgctttgataagttaggatttactttatcatatacaccaaaaaagctatcgtctttagcatatattgttttagcttggttggctgtctctcctgcttccatatccattttatattgtgcttttgttttaatatctccaagtaaaaaattatccggttcgtactgtgctacattattttctttatttgtcatttgtaaatgtacaaccacgaatttttgctgagtagttttattctctccatctccacccgcaatggtgttggtttcttgagtatctaaaaccttaatgctccatgctccacttttcccttcctcaccaactttatatatcttcttatctttgttttggtctgtactacttgtagctttattattttgtactacctttgtagcactagtagtttctttagctgtattaccttttttactgcctatagcaacacctaatagaagtattagtattatcgcaacggctcctaatattatttttcctgtcttatttaacatgatttgttttcccccttatagcatatgtatttcccctttattgtaacaatttattaatttttgtcaatgattacatctttattatatgatagtaataagaggaataaagcaattaatatagaaattatacataaaataatattagggggatggtgtatatgagtgttaaaaaccatttaaaagaaattcggatgcgtgaatatttaattgaaagtaaaagtgaatttgcaagatttttagaagtaaatgagcatgcttatattaagtgggaaaatgagaaatcagcgccatctatggaggttgcattaatggtagctaaaaagctaaataaaaaagttgatgatatatggtatcttggatgatatcatatttttttatatatcatttagaaaaattttctaatttttgcattcataagtaaactttttactttatagtgcatacatatataccataaaagaaaaaggagatgttattatgccaatagaattattggggattattgaagatgtaagtacttatcaaggaaagaatggctttggtgctaatataactatgtctgctcttatagataagcatagaaaaactttaacttttaacacgaaagatgttaatatggcaaatatatttggaaataatttacaaaatgaaatgaaggttagtataatacttacccaaagtaactttgggttaaggtttggtgacattttagatgttactcccaacccttctaaaaaagtatctacaaaatagagagcataagctctcctcttttttctattagtaatttaaagaagtgaggatattgaaagaatataaatttgtgaatgaaacttctattcaaaaagggatagatttctctttaataacattaggcttaatcgtgctattatatggttttacacagtccgtaccattttgtagcattttcacattattaggtggtactataggctataaattgcatttaagtaagtcatacaaactatataaggttatcaaacataatttgtatgatttggtgaaaaacaataatttttatactatagaagaagataaagttatatatagaccaactattttttatgattttaatgatagttttataactatcaaaatacgtcttgatggtagtaaatttagagataaatatacaaaattagagaaactattagaagatttgtttgtgttagaatgtgtttctaaagaagaacagcgtggatatataatttacaagctagataggactaatactaagcgattagatgcaagtagcataaatatgttaagcatggactatatagcgataaataataagctaaaatggaattttcgtaagtgcccgcacgcattaataagtggtgttaccggtaaaggcaagacctactttttggcatatctaattaagagttttttacttataaatgcgacgattaaaatagtagatcctaagatgtccgacctatcctatttagaaaaaatatttggaaataatgttgtaagtgctccgaacaaaatcgctcaaattttaaggaaaactgtagaagaaatgaataatagatacatggaatttaaagaattaaagaactatggtttcggtaaagactataaagattatggttatctacctatagtaattatttttgatgaagtagctgcatttatggcttctacagacaaaaaaatatctaaggaagttaatggctacctatcagagattattttaaaaggcagacaggcaggtgtttttatgatactcacaactcaaagaccagatgcagatgttattccaaccgatattcgtgaccaattgggcttaagaattgcattaggcgaaatgtcaaaggttgcgtatactatgatttttggttctgaatttaacgatttagagcttaattcgtctactgtcggaacaggctttatatacatgaatgggactaccagtaagcctgttaagtttgaaagcccctatttttcggcagattacaattttgttaaggacgtgtcttttcgattacactagccagtagcatcaaaaatttttataaaataaaaataatggaaaggttttgatgctactggctagtaatcttttaatatactcgatacttatacaaacatccgtaataatggcttaaataaagggattgcagacttaatatgcttctagggggcatgaatagtggattttgagaatgaaacattagaaaaaatggagcaaaaaagaattgactataatcgcaaatatgctaactggtataagcaaatgagtaaagatatgcagcaagaaaaacatttagcatatgcagaaactttaaaaaagaagggtgagagaataaagagctgtatgaatatatggctttgggacatataccgtaaaaacaaattactggatctacaaaaagttaataggtgcatgaataaccgtttttgccctaactgtagaaaattcaatctatcatgcgccatacacaatttaaaaaagcctttgaatgatttgttattagatggatattacccttacttggttactcttacaatccccaacgttttaggaaaagaattaaaaagaacaatagaaaaaatgaataaagcttttaaaaaactttttggtgcttattcttatgacttgcagggcaaaactacaaaaggctttaaggatagattaatatgttttgaaggtgctttaaaggtactggagataacttataacgaagaaagcaatacctatcatccgcatttccactgcctgtttttttcgcaacaatatgaccaggaactttttataaaaaacactcctggagaatttagcaacaaaagaaattcttataacttctattctctattagatatacagatcatgaaattgtggactatgtactttaaagaaataagggttaatgagaaaaactataataataccaaactccaggattgttttatatgtgacataagagaaatggactctgctggtattgttgaagtattaaaatacacatttaaagatacggatattaagagctatgatgtttttaaaaacatagaactcgctattagtaataaacgcatacgtcagggatatggaattttgtacaatctaaaattagaagatgatgcggatggtgaaaaattgagccttgaagaattcttaaacgaatcggaagttccttctctcttagttgttcgtgaaataaaagaattacttacttcgtatagagactataaaaaaatatctagaagtaaagttcatgaagatataattaaaatttagcatataacataaaaatgtatataaaatactttaaagtaaaaggagtctattttttaaataagctccttaatgtattttatttaaagatactaaattatttataagtgcattatttaccataacgtcaattcttttttttgttgtgtcatcagaaattttttttataaaaccgatagtgcttataagaactcttacaaaattcttaacaattgtatatttaattacttttattattttattcataatactacctctttttaattatacttttctagtctaggagtatctatgtatttatcacttgcgctctcaagaaccgcttgagatatttcttttccaagatcatatacattttcacctatagaaattttattatttcttgttgttagtttatatgtatccaagcaaagtgcatccaaattttgttttaacactttcttagcttcttcggtattaatcccatgtttttcacatagttctgttaatttcaagttttcttttaatgcatttattttattgctttgtccttttagtttgccttcattcgtataatttctatatataaatccaactgctctgtttagccaatcttcaataaaagccattactttagagtttccaaatatcttttcataccaagatcctgattctatttttataggcattaatttatattcgcttgcagaaacattaaatattgcacagactctttcatatatactatttataattatcatataattagccatttcaccaagttcaatttgggtcctatacattctgatagctagtgttgcactttcctcatatacacattcattactttctatagctgaattaatattgtttaaaaagtcattcttataaaaaatattatctatttcttttacagctgtatcaattgattttataaaactctctatttgttgtacggctatacttggcatattactgaaattatatatccaatttgagcaattctctattgaattaagcaacttacttgctttatcctttttcacttgatatatttcattaatcactttcccaatttccattaaatttacttttctcgcttctacttgaatacaagccaccatatttgtaacttggtttttagcactttctacattactagcattaacaccactagtaatagtaccatctaaaatatatgtatatgcttcaatatactttgccttaacttgtaaaatttggtttttaaattctaataaatacttgctcttctcagctaattcgttataataattcactacatctttaaaaatcattcattatacccctatcgttcttgtattcttatttaaaatactttataatagaagtatcaatttaagaatacgtttgttttaagaaatcactggtaattggtagttagagtgatttctttttttattgtaaaactttttgtaaaaaagagcaagcactcatgcaatccagatagtcccttaaatagcatttgccatttaagggactatccattatattaattattttatggtgcttaatactgtatttagcttattagttaactctacatttttatttgctaactctgtattgttagcctgtaattgtgccttttctgtggttaactgagttatttgagtttgtaacgtattttgttcttgaaccttcttttctgtatccgtctttgagtcatatatagtctgctctagtactgcatctataaatatatctaaagatggagtctcgcttatgttagctatttttagtcctgctgatataagttttttagcattatcttttctttgatctgccggtaactgtgatgatatatataattgttttgttcccatgacagatttatatactattttatcaattgtatctaataaatttaatgttctgttattaggcgctaaagactcagctgctcttattgcagttccaacatctccggccactgtttgtgctccgtctaaaacggtgcctgttttaaatcccttcttttttaagtacgcaaatacatacccagctccacacactcctaaaattattaccattgcaattataaaattatatttttccatttataaaacttcccttctattatttaaataatttgttccatgatttatttccgaataatccatctgtatttaatccgtgacctgactgccatgcttgtacacgacttgcagtacctttaccataaatgccatcaaagctaatacccatattgtactgaataacacgagtaggtattctatgaatataaggtctgccgcataaatcttttccataaatctgttgtattgcatttacacattgttgtccccaaatgccatctatttttaaaccacagacttgttgaaatactctaatttgttgtgtagttgcattaccttgtattccatctatagtaaggttactagaataaagtactgtatttaactgttgttgaattatcttaactggattagtttcttgtaccgctgtagttacttgtggtgcttgtcccgtaaagatactatcattaaaataatctaaatccacatccccaataacacctgacaaacttccactttctgaatactgccatgaaaccaaattaggatattgttgaggttgtttgccataagaagcaagccataaaggaacattaggaacatgtccttgtagatattcataatagaagcttaaccctgtgtaaattcctattttataaccttggctctgtacataagatataaacttatttgtatagtctatagcctgttgctttgtccaattcggttgattttctatgtctagccataaacaggtatccatttttagcccttgtatcctagataagaaatgttgtgcttcagctacaggattggcagaattatttgcaaaatgataatacccaattttaagtcctgcattagttattttaggatacctataattaagtaaactatcattgtggtatagtccctgcgtagccttttgtataactacagaaaccccactatctttaacttgttgccagtcctgtatattgtcatattcgtatatatcaatacctttatagattgtggcgtgtacatttaaaggtataaaaaaagtagcagatacaaaagtaaatgctactaataaagtttctattcgatttttcaattttattacatcctttcttactttatttttattaaatatcctaaaacaaaaagggttatggtaactaatataccaaaaccccatttgagagtatttactaagctttttaactgttcacatagattttcaactttttcatctacagctgatgaccttctctccaattttttaagtctgtcgctgtgatcattcagccttacattatgcaaattaattttctcgtcaataaccttgtgcctttcttcgcaaagctttgcatcataattttcactcatttcaatcacctctaaaatattacataccccatgcttttagcttttgtttttacagctgtttcaaattttaaatattgttgtgcaggtgtctctccttctgtatttactgcatttgcttgagtaagtagttgcttgttcgttacatttactgttataccattgaaaatcatagctgttggttctaaattactacagttcaaataagccacaataacatctttgccattatcacttactgtaatagttgcactcatgttttggctctctactatatccatttcagcaccttctttctgtataaaacaatttaagctgttttgttttgattttctagcataagtattcgattttctaaactaattatcttactttttagttgttcaactttagcatcttcttcttgtatacttttacttaaataagggataatcatatcgtctcttggttgcataatgactgtcccgtttttctgtggtacagataatactaacgctggattaatagcatatagctcttgagaaacatatcctagttcttgatgcctgccatcttccttccaatgaaactgcctgtgcttaaatctatttataatgtccaaagcattttctgtactatctgcaattgcatatttaaaactaatatcagagttccacacatttataccgtataggtgatccacattagcaacttccatataagcaccattggaaccattatgcatccttatataatttataaacccatcgctttgagtttgcactaaattacctggattatttatgttgtaattatgcaaatccatattaccattaaaatttattggatattgttttaattgactaattgtaattaagcttacagctcttcctgcacttccaacaaaattgcctaaatataactcgtctccattgtctgaatagacagcaacaccaaggtgtccatcatcactctcagatgctgttaatgatccgacaaaattaccactgcttttccagtcatagcaattaaatgcgttgttacgaatatccgttgatatttgtccattcgaatcatattgagataaggtacctctcatatttaaatctccattggaatccgtattaaatacaatattgccagatttatttttaatttctattcctccgtttccaatatgtaacccagcgccatctatttgaatcatagctgaattaatttgattaaatgcatattgtaccgaggttgggttctgttgtattgtacttattacaccatttacatctactttagtgcttataagattcgcttgttgacttatagtactagtattttgatcaatttgtttttgtatatcgtctaaattatatacaaaactgctaggagctttagtaccttctacgagcacaacatttccaatactcgttaggtaaccactcctccatacttgagctgttccgccatgagcgaaatctacggctacgaaacttgccggagttgtgaaggtaaaagattgtggtgtattaggctttgaataatcgtaatcaaacttagtagtgcctatgcagtttttattactgtcatagtactccatttgattataaaccccattaacgctttcctttgaagaattaaatactattgtataagttgtatttggctctaatatatcagttagttcctgtgaaattcccgagttataaatttgatgtcctatatatagtgttccagtaagaatatatgggccttgcccttgctcgccataaatctcagggttgccccaaaagccccaatagttcggggctgtagtactccctggaattgcaccttttaaaaagtttccattgtgaattaaattgtttattcctatgtttatattcccaatagaagcttcaatatcagtttcagaaaccgaacttgttatcttaccatgattagcctgtataaatgtttgtatatctttaaagctactataattatctgtagtgtcccaagtttgtgtgtttaaattaaatcctatagcgttggcagtttctgttacttgtgatgatacagaactaattgaactttcaatatctaatggactagggctccaatctgtagtcttgttacctttttctagctttaaagagtttaaataaactaaaccattcattgagaaatctatattcaagttagctgttttaaaggcagaattaaatttaattggataaacgtactttttccatactccctgagttaattggctcgaaactatatcgcccacttgagcccaagtgtcgagtaagttatttgacgtatcatactgaggaaaatatattctcaagtcacttgtgaatttggataaatcagggcacattaagtaaaaacttaatacataagtttctcctggaataacttgattagaaagattttgagatattccaccataaacattcgaagtagcacccgttatatttatacatacagaattattttggttatacttgttgtctgttgatactgttgcacacccttgaacccctgttacgccccaatggtctaacccattgaaggcagtatttcttaatacatttgttcctccaatttgcatgttatctaagttttctgtaatagaactaaacctagcactcaaagtttggttgtctactgttatactgctaccatctattttagtaacagcaccattgatagaagttacaaccttttctatatctatcttcttaggatctaaagagttgttatctaactttccataaccatctgtaaatccttctttagttattccatctacatcaaagagtgtagttgtaccatttttagctcttagaaccataccgtaatcgctcttatcaccattaacatcccctatacagatgcgttcaaaaagcttattacttgaatctgtatcaaaaaattgtattttcgaacctgttatgttcaaatgattatctccacttacaacagttataagtgaagtatctaactttccagaacgtattaaacttgcatcaagttcgcttatttcagcacttccaattgcaccttgcgctataattccactaccagcagtaatagtattagtctttatattatcagcggttattatttgcgatttaagggtattggtagtaaggtccataatagttccaacggatacttttaaattgtctacatttgcacttgcaacatctaaattttttatagttgcatatgtagaatcaagcttatcaataaaagcatgatttattttactctcatttactgcctcatcctgaatattagcacttgttattgtagcttcttttatctttgcaccttctattgttgcatcctgtatatccgcattagttacaacgagcttatttacactttctctatctatttttgcatttgtaatacttgcatcagccacttgtaaagtaccaacttgtgcatttccaatttgtgctgatgttatacttacattagttactttagtccagtctacactgcttatagcattagaagtcacggtattatcagaatttgttatttgttcaactgtgtcgctagtattatcaaatctttttattaagtcttctacattttccaatgtgtttgaaacttctgcagtatttttttcaggctcttctggatagatttccagcttctttatgcgctgattatcttttattcttttattcttacttaataaagttatactatcgcctaacccgtagtctaatattttataatcttcgctcaagtttgctagatctgcaatactaacactataggattttttaggcttactgagttccgaaagcctttctgttgcatcatcctttaaatcttgtgctattgtataacgattatctacccaataagcttttagaatcttcttagtgtattgataattactaacatagttatctccgttatttgcgctctctatagttaaattattagcgccaataggaattatttgagtaacataatcatttgtgtcactttgtaaatttagttgccttaagtttaattcatctgaaaaataagtgcctttgtcacttccaatactctgataaattaaaacttctttattaatagcattaaaagctatttcacagtgatacattgattgtatttcttgcagtacatcatacacagagcactgtttttttattatgtttctctttctgattacatcacaatatccaacatgccatgtagtattgaccattgccaaatttgctgttgcttcacagtttccttgagtttgatttatgttgtctattaaagtaccttttaactcttcaacattaacttcacaaacaacctctttataatcatcttcgcttatgtttatttgctttataacatattcgttttctagattattacgtatatagtattcttcctggataatttcataggcaggatcatttctggatatagaaaaagagagaatatctagtttattgatttctctctctaattttaagtccttataatctgcgatatttcctattttatttttttgtgtatctaatagtaatagcatgccttacctccttactagaattagtaaagctttattcttctatcatgcattctattgcttgtatttcaagtggtgaaaattgaacgttgttaataatatctaacttaaatttatgaatatctatatctgtttttatatcaagcaattcattaagatctttattatatccttctgcatctgcaagttcaatttttcctttatcatctattgctaatttcccattattatttttttgaccatatttattaataagtttttctttttcttttctaaaaattttaagctcttcttctattttatttatatttttagctatagcataactagcttttataggtagttgcttgttagatactgtccttaaagcgcttaagttttctattatctttctattacttagttccatttgtattacctcctacagcatctagctctgtatatactgttgtataaaagcttgctatatcactttggactgctgctttattagccgaatataaatctttatttattatgctcacagtcacactagggttgccgttttctgttatgtttgcactaaaatatacaacttgttgagttattttattattgttactgtcggttgtttctacattgctatatccgtttaaatttactgatcttgttaagtttaacattttaaaacttcccttctattagttaaatcgtggtttataagatattgttgcacttgcattgttatcatttaaatttattatgtttgttccaggtgctaatttagggaactcccaaaaatcagcctcagcgaatttattagctgttggaagatagtccaagtcccttgagtagaagcaattaactttttcaactaaacttccaattgtaggagtaatgccccaaacaccaccactgccttgatggtttatatataagaattcaataatgttccacccggagcttaagtttaaagtcactgatggataacctgcattacctgtttcaggcgcttctgctgtatcattgctgtacacactgtcaccattaaggtatagattaacaccatcatcatgttcgaatttaaatgtaatactttttgaattgctaacatatagcgcagttcttatacttgcataataattagttacattgtcatttattaatgttgctccatcggttaaaagtgattggttgtaaggagaaatagatttatttatattggatttctgaggtattatttttggataaaaaagctccggatcattagcaagtgcaatattccatctcttaaatatccatttattttcgcctgtatcttctgttacccaatggtctaaatccggctcatatataagctttttttctccatctatagtgactggaatatcttttttaagatataaaagtcttatcgtcgtatctgtaataccatcaatataaacataggaggtatcaactggttcagtaatggttataattgctggcgttttttctgtgccttctacatttacagttgtactacctttaaagtcctgatttattggagttttataagcataatcggtattaaaagtacacgttagagttaatttattaagtactataccttttgctattgaagtactttctaatatacaatcataaaatagaccaatgtcttctatttctaatgtgcatttttttaagtcatatattaacttgctgcatttaatatatgcatctgttctatcctcacctataacttgtatttcagctgttgtttttttatattgaagctgctggttatataaacttggagaaatagaatttctaagccattcttcactattaacaattgttgccggttgagggtcccacttaaggagacgtgctccataattttgtatatctattccattaattttcacactatctcatccccttgaattttcttgctattttattgctaaccactggtgtaacggcttctcctatttgtctgctatccaaataaattggtgatttaactattatagtttcagcatgtccataaccaccactgttagtagtgttacctacataattattagtagtgttgtatgtgttaccagatacatctggtattgatattttagtacttttaattgtatttagtaagctcttgaagttatccattacactagatgtatttttattgtttaaaacagtttctcctccattgaaatatacccactcagggccttcttcacctgttaggtgccaacctttggatgcattgtctgttccagttttatatccaatataagatgaattattccaatttggaattgcgaatggagttttatatctgtctgcaatatatcttatagcagcaactgcattgtctaagccatttagaatgttcccaaacccattctttgcgtactctctgaatgttgatggtagcatttgcataagtcctgttgcaaattctccgcctacaccaatattatttattaatcctgcatcaccagttcccattgttccaggattaccactttctctacttgttatcatttctagtgcaggcaaccaacttaaaggctctccatctatactaagagctgcagctaaaatagaagatatgtttccaccggctacttgtacatttccagttaaatttcctaaccatttttttataaaaccgcctaaatttttagattgaataccgttcataagcccttgaccaaccatggtaccagtccaaaacagctttcttgaaggactgtgtatatcaaatccctcattgaatgcctttgtaactttatcggttaaatcttttactatatttgtgagattgccctccgattgttgaatacctgctccgattgaatttactgcttctgctccataatttgaacaactatttgcaaaattatgaagcatattccctgctgtatttgttatattgtttaatgcattatatattgctccggaattattttgtagcccgctttgaacacttgaatcagtctttacaccgtgagttattgcattagtagcaaatgtatttaagttattatttaatgtatctgttatatttttttgagcatttacaacatcttgagacttattatttataccgttttttatgcttgtatctgtattaagtccatgatttatagcgttgctggcaaatgtactcatattagtatttaatctatctgttaaatttcctaatgactctgttgcaacaccagcgttttgtgtgatacctgcccctaagttctgtatattcttctttccatagcttatatatctagttgcagtaacattcattgtgtcattaagcttatttgtcatattgttaaggggatttatagcataatctaacgaatttgttaagccttttccaaagctagtatttaaattctggccatattgttctgtagtcttgagcttatcactatctgctgtcattgcaggtgcagaaccacctgttttttgcatttgctcaacaattttttgactatcattatgaggaattacctgttctcccccattgaaccacatcaattcagcgccttgttcaccaacccagtgccatccttgaggtgcgttttctgttccagttgcaaagccatctccacttaatattttgcatagctcattcgctgctccaacagcacctttttgaatttttgcgattattggatgcttatcaatccacttttgcgcctcaaccattttgtcttgtattgttttattaatttgatcccatgcattcccaatatctttccctaactggtcaaaagtagtagaaatatctctctctagtttttgccacgggctaagcatttgtcctgttgatgtgttcatgtcccaaattgcaccttggttcatttcaccaactttttttataacaccttgtttcatatcgtctgctttgtttatagattcgtctctttggcgcttagcttccttaatcatatcatctgcttgctgtgctgttatttgatgtgtaccatcacgtagttgtattatatttgctaattggtcattatattgtttgtttgcagcatccaccgcacctttacgtgccttttctgcattttgaacagtgtcactcgcctgttgctccgttatattcttgttataatcttttaaacgttgcataataattttactatcaacttcgcttttggaaagaatttgaacaccgtttttttgcatagtatctcgtatttggttaatctgttgccactcttgagcatttacacttctgtgttgactacttgcattttgatatatttgtagtatctgctgttcataagcggatgttacagccttttggtctctagcacctctttggatgttaaatagtattgcttgttgttcatcatttgaaatagaggtactctttgaaaataagttctgtaaagttttagtttcatcctgtgctcttttatctgtagcagaattaaccatattagtcatttggtcatacttggattttatttgactaacttggctctgtgttataccaacgctattggtcatagtatccttaaggttctttattattgcatccttttgttgcaaagtcagaccatctgtttggtgcaataggtctttgtatgcatttactatagtatccttgttttctgctgtaagagtgttagtattgtcaactatatcagtaaacattttaattctattagatttaaattcatcattaaaacctgtagaactgttaactatgtcgctaaaatttttaattactgtattctttgtttgtgttgtgaatttatcagaatttatatacatatcttcttctgtttttgtaacagaatcgttaagtttttcatacgctccaacagcttttttagtagagtctgaaattttagttacggaggtttcaacctgacctgccatagtcgcacttgaagcagagatattgccattttttacttgtacatcatcagcaaaaaggtctattgtaggaattgtattatctgtaagtttcttatggacttcatagccaacaaacccaagtgctcctatcgcagcaaccgcaatagcgataggggctgctaatcctactgctgctcctccaagtgctgttgctccgccttctgctgccccaagtcctcctgctgctgctcctgcttctgctcctaaacctcctgctgcttccgctgctccgccagttgcagctccaagtccttcgattgttcctgctgctgttcctgcttcgcctgctgttgttgcaattttaccgcctagaccttctgttttctctgccgcattacctaatttaccagcagtttcttctgtttctttgcctaaatcttttactgcgtctgttgctttacctgtctttttagtagattcttctacatctttttctaaatcttttgctttagatctagaattttctagtgtatttgagttactttgtttagcttttgtatttagttccgtagctgctgtgttctctgcttctgcttttgtattattgttaattgtctgagtattagttgccacagaactagtattttctgcttctgcttttgtattatcctttaaacctttttctattagctttttaccgaaccagtcacttagtttgcctaatccgttaattattttccctaatccttttgttgttttaccaataagggaaagtgctggaccacctacagctattaaagcaccaatttctattatgttctttttagtagcatcatctaatttgctaaaagcattaacaccgttcgtaacttctttaactactggtataaccgatggaagaacatcttccccaaatgctacgcctaatgcgtgtacagactcttctaattctttaaaattgtttttagaagtattcttcatactgtcagacaattttttaacttcacccgttgcattattagcatgatcggataaatcttttaagtatccgccacctttattgagtaatacattccaacttgctaaactttcctttccgaaaatagttgcaatagcagcctgcttttgttcattagtccaacccgccatttttccattcatttcgtttatgatagtagtaaggtctttcatattacccttgctgtcgaatgcactaaattttagttcatccaatgcaactttcattttctttgttggttttgttaaattaactaagcctgcttgtaatgaagtagctgctgtgcctgcatctataccattcgattgaagttctcctattgctgccgctgtttcagccattggttgttttaatgcacttgccgtaggtccaacggtgctaaaagattcactaaggcttattacacttgctttagtatggtttgcaatataagcaaatgtatcagccatatgtgccatgtttgatgttgtttccgatgcattatcggttttcattttatacgcttcaagggatgatcctaagccatcaactacgggtgcgagttcttcatttgctcctcttgctgtatttaatgctatacccattgcctcaagcgattcacttccactatagccatcctttacaagtgttaagagaccttcgtttatgttatcagttgactgtccaaaatctttactccactgtaaagatgaatttgacatttgcgacataacagattttacatcttcgcccttagcggctatttccttttgtatgtctgccatttgatgttcgaaatctgatgcagctttagttgctagtcctactcctgctacaaatggtaatgtaaagtgtgtgctcatagtagatccgacactaacaaatccttcgccaaccgtttttagagttttagatgcagttccaagttgcttacctgttgcaagccaaactgaattttgttctgcaatatgtttatttgttgtagctagttctgcttgcatggtttttaattttgcttcttgattactaagttgtatagtatagccatctacggatttagaagcacttcgtactttctgttccgtctgagtatattctttgtttaattcatcataatctttttttagcttctgagtagcttcggcatttgcaccaagctcttgcttactttcttcccaagctgtttttgcagattcaactttttcttttaattcaagcattttttcagagttctcttgaagagacttcttagttttatcgagttgctcctgatagcttttaactattttattttgtgtctcaattttctctccaagagccgatgcattactttttaaagcatctacattttttccccaatccttgagccctgcaatactttccttaaaaccactatctataatagttagatttctttttaagttttgcactccttgagtaaagctagcatcttccatgcttaaacgtatcgctaagtctgctatatcttcttgtgccatgaattaacctcctttcttcaaaaataaaaaacgctaaaatatttcattagcgtatacaactttttcttcttcgcttttaagtccattaaattctctataatcttcccaaagcaaaaagaattttcttgctgtcattttccaaaatttttcctccggaatatttaattttgtagttgcaattattaacaatcgtgtccaaggaaacctactatctcctacttgttttccttggttccctcgtttttttgttcaggtagtgatccccataacgctttagctaaatttgatgtaactggagtaaagtccgatgatggaattagtgctccaacttctttttctgtaatttcctcgtttgcttttctcatggcaatccataaacaatgtctcgcaccttttattgatcttattgcttctagtgcttttgtagcgtctccatattcttcttctaaatcacataaatcatttaaatcaaaatacagatttacttcttttccgcctatatttgtttttactccttcttgccttaaatcttttatttcactcattttaaaacttcctttcaaatttttatgtaaaaaagagggtattaacccctcttttaagatgctgctgtggccgttgtaaatctaattagttgtgtatctagtgtttgcccatagagatctgttacatcttgtacaacaagtacatagtttttatttgccactaagtttgttgacggtgtaatggttattattttgcctgaagaatctgaacttgtagttgtgttaactgttgcaccatcagacacgttgtaaagcaatatagatgtagcattcattattgggttattgaatgtaagcgatggtttagtatctaaagatatacccgttgctccatcttttggtgaacttgcagacaatgataacgaaccataagtaaccaacgaaggtattgaaacactattaaaccatgtgtcgtctatattttccggacagtttggatcacatgtatcaacatgccactcccacggatgtttttctaattttccatctttaaatgaccactcggtcggctgtgctgaaccggatattttgggaacttggctaaagtccggtttaccttctgtagttttgtaatcatcgtcaggtggttgaaattgtgttttatagattacaccatatctataatagatagtatcatccactttaataggtgctttgtacaataatgttatccaaggtgctttatcatttaaagctcctattgctcccccaccaccagctaaactttgtcccaacataaatgccctctgtgagctggtcatttggaataggttaatagatacatcgcagctatcaaattgtgtatcctggtcaacttttctattttctgcataagctgacgcactgtttacctttggttttaagcttaattcttgtacatatttgtagtattgcggtttagtaaatgtcattcctgcagctgaatctgttaattgttgcgatacatatagtttttctatacccatattaggcatattaaatcaactccttcttaattttttgtaaaataaaagagccctcattgagaactctctgcgtattcaaaatcaaatattttatgttttatttgggtttctggctcataatactctttttcgtctgtacgataatagcctgctgctatcatcaacgttcttacttgatctgctaaatcttcgtaagtatcctttgtccaaatgtccacttgtagatgataaattgtagctatctctctattttcagcataagcaccacctcttacgttatagtagctatacgttatatatgttgtttctttaccgctatagcttaaatgacttactggtactcctgttgttttcaatatctgagataacgctgtcattgttttataccttcccttaaaacttcaattatagttctttttacttcttctttattgttttgataagcagttctcatgaatggatgcggtggcgctggtgctggtcctgcgtgtccaaattcaaccaaatgtgcgttaggtctagatgtaaaaacttttatatatcttccaccacgtagcctatccttcttaggattgccaatcgtaatgctttccaaaagctttttagttacaatgctatctttttcaaattgttttgagcctaaatgatgtaatgaaggcgtctcaaggttttgctttgcagcttctagaataggttgtgcacccgctcgtaaagctccattttccatactgctaacctttaatcccatttgttcagctttatcaattaatgctcctatatctgttactgatgcttctacacccatttaatcaccttcttgtacaatttctattgccgtaacctccataaattctccctgatattttatatcatctacaaaacttatattaaaacttctgtcgccaaacttaattcgcatatcgttacttatatcatttgtgtatctgattgtgaaaattgcagtccttttggattgctcttcacccgcagcataaaattcctgaccatgaagatttttagcagcagcccatactgttttatagtcctgcaatttttttatctcattatcatatttatcagttgttacaaccattttttgaaatgttattctcttattaagttgagctgttttggcttgattgctgtaatgcatataaatagtcccctttcagctgtaaaataagtgttgtaaccccaaaaggcaccttttttaggtctgtttcatctgttgctgaccttgttttataataatgatctgttaacaatattaaagctgtatcaaaacgtgggttactgtcataaaagccagtaaccccatttcctattgaaccttttatataatcagaagctgtctgcataaataatgttaacagtgtatcatcatcggatgtgtcaatccttaaagataatttaagttggtctaatgtaaccatctaattcaactccttagcttgatgcagaagcttgagttgtaagcgaaatctctgtacttaaagtgctttctcctgcaccatttacagccgaaacttgatatttataagtagttgaaccagttaaacctgtatctttatagctatttgttgtactttgacctattttagtgccatttttatagatattgtactgagttgcccctgcaactgcatcccatgttaaactagattgggtaattgtagttgttccagttaaatttgttggagcagttggtttttggggctgattagggtgtaactactgctaatctaaatgcagattttaatttgattttatggtctatccatgcagttaagacaaagctttctataccagttttaacatttttgtcttggtcataaagcatttttaaatcatagttatagtgagaatatcttaaatctcctacaaccggaattgtagcaagatcacagaatattactggtgcgcctaatatttgttctggtggtgctagaaataatgatgtattattgttagcaagttccttaagcatattaaaatagtccgactttttcattactaccttagcattttctgaatacccatcctctaaatctgctaatgctgcaattatagcgttaaataaagtatttccgcttacagttttaattaaatagttccctttatcatctttttgataaaagctcatatctgttggtttagctgattcaaatgcaactttcttttctttcgccgcaagtccactttgcaagcctgcctgcacagttgcaacaagattagtctcagtaccatttaatactgtctcagtaatatcacaaaataccttaaatttatttcttccgaatgttaccacatcaccatctgcctctaattctttagcagtttggctatcatcaggcaaaaatccatcatcagatagagtaaatgatagtttagggatttctagattagttatttgcgtaaaagtggaattccctctcaatgggtttgttgccataggctcagttaaaagctcagtacttattgttataggtaataatttatcaccattttgaagagtactgtcggcgcctaatacagcttttatattattcatactaagagcatttctaacatcatctggtatagaatttttagtcattactgcctttataaatgaagcctttgccttgattgttttggttttttcatcatctactccatcaagtatgttactattagcttgttgcttagctgctaacgcttccttttgctcagcttccatactgtcatgttgtgcttttaataaatcgaatctagtttttaaatcagccttggtttgagttaactgatttaattcatcagttgtcactttaggatctatagctttatcagctatttcattttcaactttttcaagttgtgctcctatagttactaagtcctgtttcatttcaaataaagttttctttgccattttatattcctcctaatattgttcttgtatattcagcacttttacgtgctttttcagctattttttttctttcttccatgtctacatcttgtaaaattgccattggatttgtttcatttaataggtttttaggtacattgcggtaattattaaatagttctttgcttgtacatgctgtcgcattattttcttcttgaacaacatcacacaatccatatgaaaaacactcatctgctgatagccaagtctcattgtccataagttgttgcaatgtactttgatctaatttgtcacctgcttttgctaaataactctgctgcatggacaatcctattttgtctaaatcatcagcagtctttctcatgtcacttgaattcccccaaactacacttgatggattatgtaccataagcattgcgtttttgggcataaaaatagtgtcaccggccattgcgataacacttgcgatgcttgcagctaatgcatctacataaacattaactgttgcactattttgttttagcatgttgcatattgttacaccctcaaatacacttccaccaggggaattaagatgtaaatttatagtgtttagattgcctaatgcatctaaatcctttttgaaactagcagctgtagtatctgtatcatcccattgataacttgttatttctccataaataaaaacatccgcttgtttatcatcattagcggatgctttcatttgccaaaatttattttgctggttctgttgttttggttgtgtcgccaccatcattacctccttttctttgtgttgggtccatgtctataggatataagtctccacttatccaaagtttatccgcactgccaccctctggtggtaaatcttcaagcactcgaacttcatcaggtttcatatagccagttcttaccgcagattgataataggctgttcttgaagcagtatcacctcttaataatgcgtttatagagaacttaaagtacaatccctgtgctctttgtacaggattaagaagtttcctgttatattcctgttcatactgtctaacgtcaggagttagtctcatttgtacatactgtatcatgacttgctcattgcttgaataagattgtccatctgtatcattcacaaatgccacaggcacattaaatacatttgccatcttagttcttgttattttctcagaattaagcatatctgcagcattatatcctctttgtaattcagtaatttcagtaccgttttcctcgaagagcgctcctccattatcagctataaaagctttgaaattatcaattatagcctgtttttttggttcctccatatttgcatcatactttactttgaaactatctattttatccatttctctaagtgaaaactcttgtactgctttatcatatttcaacgcattagttagaacctttataggacttataccagctagtcttgatgatcctgtaatatgcttaacatgtatgatttcggtattgtaaacatatgttgtcttaccatttatatttacctcataccataatgagccatcagcactattgataattggtgtcacataatacgcaggtaccggaattaaagatacaggattaagtcttatatctctttcaattaatgcataagcattgccatactcattcctatctgtttccattttctgatgaaattcaaagcttgtcatattaggatttggcgaattgctgactaaatcggatatatcgttgttaattatctgatattgttgataaatctttattggtagtgaagcaaatgtattacttaatcggcttataatactaaaaataagctcattattagacaaactgctattatcaactccccaaaatgtacgtcctacccaattagtaaacctttgggaaattggtacgcttattgtctctgctcttatcctgttagacttaaaaatgttttttacccttttaaaaaaattagctcttttaatttttatcacctccttaaagaagcaaaacctacgcttgcaggtcctttcttaattcttgcaagtttagttacaatatctacatgagcgtctaatgttgctgcaaaaccatcaatttttctgtttttactctgttttgtaggtatccagttcttatttctatcttcaacaagctttacattctttaaataccacctataaatcttgctgttattataaataacttttccatcaagtagcatttgcttaaagtcttgaagtggaccacctaatgttataaacccttgtcttactatttctgttttaaatcctaaatcttttaatgcttcatttaatctcaacgcttttgctggatcatacattattttggtaattttgtatttctttctttgctcaacaaaccattcttgtacatatatatcttttacgtacattccaggtattactgttaaatctccagcttttatccattcatcgagtctttgtttattcttatctctgttatatctagcctttgaaatccatgaatgacataaaacaaagacttcactcgttggtaatgggaattccaatacggcggatgtgaaatcttctgtttcagaaaggtcataaccgcctgtgcactctaagccttttaatgtatctatatctattgttttactgtttttattgatagtttctatgtctacaagcgataattctgttacatctgcaaatatattgaactgttttgttatccagtcagcacgttcttgagggctttttctatctttcttccaatctgatacaagtccaacgaaatccatgagcccaatattaggattagccttaatccagttcctcggttcttctgcttcttcaatactatctagcttagccatgtaataaaatgttcgctcgtcaatattatcatctatgttctcaaggcactccttaccatcatcataaaattgcatcagtggtccatctagaacatatccagcggttgtaatatagataattaatggctgttttcttgctcctctggacttttttataacatttataagcttaaaatcttgaaattcatgtatttcatcaaaaattcctaagtgagtattaagcccatcgagtctcttactatctgatgctcttgcctctatctgtgaaaacttatcctcatatcttatgatgcttctcaacggcttgtatctctttttcaaaaatggtgaggtcttaaccattgcctttgcttcatcgaataattcatgtgcttgttgttctgcattggctaaaacataaaccctggcgccattttcatagtcaaagcctacagaatagttagaaagccctgaaataagcgtagtttttccgttttttctgccaacgaagattaatccttcacgaaatcgtcttattccagtgtccttatgtacccacccataaagtgatcctattataaaatgttgccatggttgcaatacaagttggtcgaagtctcctttagatggtttacacttttgctcaataaacctaataggtctatgtcctttttcttcatcaaacacccaaggaaaatcatctgtgccttgcctttctaaatcctttaaatgccttttagctgctaagatattttctttacttgctggtattgttctgtcaactaatctttctgcataccatgttgttaaaagctccggatagggttcttcaagtattcctccccactctttttgctcatttttataatttccccaataatttgttagttctgtataggacatatcaagtattttagaattcatcttcatcatcttcatttggttctttaaaattgattgctaacttagcacgtgccgaaggatttaaccctaagtccgaagaaagtgatcttagttgactaaccatatcagacatcttttttataaaaggattaggtttatcttcaatccacataccatgtttttttacttgtgctttaaatgaaagatactgagaatatgcatcacaatataatgcaaggtgtgtaatatcagcatcagtcattaattcgacctcaattagcaactttgcaagtcttttaaactctttttgagctgttttatcaagccaacttggaggttttatattatcatggccaatttttaatctctcttcattttttaaacgcttttcaatctcgtctttagtcctgtgatttttattaccatgtaataattgaagtcctattggttttgctggattcggcataattcccaccacctttcgtttttataaagttagcaaaatagttacttcccattacctcatgggacactcaaaaaaaattgatgagcgaatttattggggaggaatgtgttgacaccggtctcccacgcatgctttaaacattttggcataggggggggatatctcttatccattcctatatttccggattgtaaaatttatatatatcttttcttcttttaaccatcttttttctataactatttcgttcaggatgttctttattgtggcatgctgggcatatactctctaggttatctatatcatatgctttacttaagtcctccctaagttctaccttatgatggactgtgtttgcctgcgttattgccccatgtcttaaacattcttggcataaataattatctcttattaatactatctttcttaccttttgccatcgctttgacttatatatcttgtctatatcatcccttgctcttgccatatgctatcaccctaacggtatcacattaactatgatggctttagcattgtttagtcctatattgttcgactctttagcatgcttattaagatagttacatagatcatctatatcgttcctgcatatattacggtctaagaaacctgcttgcgtattgccatattctattacggaactaccatttacatatttgtaatagattaagtaatcatgtattttaggtactactattttgggtatcttcttttttctaagtcttttaaaaagcattactttccctcccgtatttttaggcaaaaaaataaagcgtgccaattactccaattaaggaataactgacacgctaggtgtgctaactatttaattatttattatttgttcctaatacatttctttctattctgtcttctacacgtctattcatccacataagcgcttcttctacatgctcaagcgcctttgcattatactcagaactaaatggtccagcttgaaaagactttaatctatctcttactatttctaataggtctgtgtctataacaccatgaatagaatcttcctcttttcttgcaccttgttgaaattgtatttcagtagcaaataaaggctgttcagtacttatattagcttcattactaattattaaataattgtgatgtgcacctcctggtccaacttcatcttttgataatatatgatttaatttttctctcttttgaatagttgataactcactcatttataaaccctctctctttaaatttatttgatttatgtatttgtgttgtagcttcttcctttatataaaactcatttacctctttacatttaggacatttcttttttatatgagcctgtccttctgcttctaatagaaccttaccgcatttagcacatcttaatgtttgcatgttgcctccttgccagtctttatattatctctattataaacattacattcattattcaaattagttatctttatgttattagttcctttatgtacacagccctttcccattgctattatatcttcttcagttgctttcggattatatacttcgcatccttcacatggattattatactgatatactaacttaactagtattttatctctttgagcatattgttttactaactgtactttacttataaatcttactttatcacatataacttttgctatatctttaaaatcgtctttactaatatttaaataactctcatcatctttaagcagtatcttcattacttacgctccttatctgttaccaagttaattcctaacacttatcatatccacttaatagatctgcagcttctttatgattaattactatttcttcacttttaaaaacaagttccactcctgtttcacctaaaacattctcaattttaggctcttttactaatatataatccaaagcttctaatgttgttttaacttcttctaattcttctaatatttgattcttttccactttgcttcacctcttttaaagctgtagtaactatctcattagcatattcagtactattaaggccactcataagtccttctaagaaaaatatacctttaaatttatatctagcttctcctgttgttgtgcaagtcatattatactttttcataagttcatcttctaattctaatcccatttaaaatccccctatgtaatttcttttccttttttacataattcccaattacatccttctacatagtaagtgtctccataagtatctaatatttcttctaaacgatttatgtctaaaacattctcttctttttctatcacttttattaatttatctttctttataaattgcatacttcatttctcctctaatcattaaccctttatttttaagggtgaacatttcgttcacccctctgtcttccgtatctgttattttcatttataatatttaattttttaatccaacttcttttattcatgtttaattatttccaccttcgctaagcttccgcatctccatcatcttatatacgtatcttgctgatgctttttctaattccttctgtacatcttcacctttttcgcctttttcccttagcactaaaagttggtctataatatctgccgattctctgaataggtctttcattttaactagatattctaaatcattcatgataatcctccctgattttatatttgtagaaatgtgagtgggatttgaacccacaactaagcacaccactagctatggagagtcgaactcctttaaaggtgattgtacgtcaagccttgcgtttacctattccgccaccacattttattcactccttgtaaggttttctagtaactcattatattcatttacccactcgataggtatagacttattagcttctgtgtatctatccatagcttcttttatatcctgtattctctttccaacccatatagtatgtggttctaatcctgttggtggacgtctatatacgtttttgggtgtatgtttctctaaaatacttattttcccattatagcctctaatcttatattgtcttttacattcagggcatgtgtaatcttctattgtgggtgcttctttggctcctaagaatccttcttccattgttttcaacggtggtgttattggatatccacatttgcaattcatcttttcattctccttatttatttaccttttatcgaaaatatggctgtagcgccccatccagtacccattagtaatgtaattatatataatgaaggatgtattaaatacttgcctgttcttataaatagaattattccaaataaagataatataataaaagatacagccatcataagaaatttcgtttgctcttttataaagttcatgacttaaacaatcctcccgcatataacgcattggacatttgctggtctttctttatctttagcccaatagcttttataatttgtttgcaagtcgcaattctcaaatgcgccataactttgttgcatttcaggcttagataaaaacctgtggcagtttaatcttaaaaagcaagtatctttcaaacacattactggattgctcatattatttctccccactaaatttcttcaattgttatgcttgtgcctataactgagtcaatttctttttctaattcattaactaattgttgaattctacttaatctgctttttagttctgctaagttcttaactcctgtggtttttaatttataattaagtcttattttcccattatccatttttctcactctccagttttaattgataacatatcatctattgcgttaactataaggattattcctgcacttatatttaaaaatttagggtcatagcagtttataactccaagaccatataaaataagaagtataccaaaaacgcttacagtaatactacttataatactgagtctttttactattaatctttttcgcttcatgcttttacctcgaattcttgatataaaaaaagagcccattaagagctctcattactatctaatttcattaagtttaccacatatttcacaaaattttacttgtggtactatcaacaaacctttatatcttattgccatatcactaggtgactcaattatatatttatgtactccaattttgcacaataatttcctaatcttattcaatcactctcacctctatttaaaataaaaaagaaccctgttaagagttctaatatataaatatattttctattcccctattatgaagtattgcattcgtcggcaaatacttaaagcattcttctgctaatgaatacaaatttgctttaataagttcagcttttagcgctctccataacttttctaaatatatcacatcataagttgcatactgtatttgctcttttgtaagattttctgcgctccaatttgatttctgtaatttcttatctatattaatattcaaatattttcttaataatttttttaatgaattctctatttctataccattcaataatttagctgcaattttagtacacactacattattaatattatatatcttaagatttttcattaaaaacctcaaatcaaaattagcatgatgaaatatttttataattttactgcattgcaaaattccaattaaatttttttgattggaattattatatttaatcaaaaaaattttttctttagcacaaatttgtattaagcaaagtttatcttttaaagggtctaaccctgttgtctctgtatcaatagcaatatacttacaattatttaaaatatatcttttgtcattattatccagatctaacttgcacaatttaatattatacatatatatcaccctttatatactatttaattctattggatcagcttcttttataagttgatttatttctttcaaataaatgttatagaaacatttttctttaccagtatctttaaaaatcatagatggcattcttgttgttttttcttttgtggttttggtttgtacaactataattctatcgtctatcctatacatagcattagttggttgtcccttgtggtaatacaatttaaaagtacttttggtagcttttttaccttgctgtagtttcttattatactttttcttccatgaacaacttacttcatttattaaatttttaagttctcctttttcatacccaaaatgttcttctaatgcaggaacaaatagagagtctggatgaactaaaacaactctaacgcaacaatctgaatttaataatctatctgtaacttcttcgatattagtactcgtccaagttctgccataaatatgaactatatctatattgttttgcgcttcttttatataatacttataatttatatcagctatccctggcatcatagattctaagcctgtttcatcaatttgttcttttatatgtactttatctagtattaagcttactaaactatcttttaataaataattatcaatcaaactaaatataccagaaattaacaccgcagatgcaatattatttataactccattgaaaaaactgttcttaataacatttgctaataaaaaaagtataattcccactgttgctaggcttaacccatatgttatatgtaaatttttaaagtatttcttatttgaattcatattatctccacctttcaatacaatattctgtattaaaaggtaaaatcctcttaaatgtattatattttttaacatttttcctactttttgttgtattttacttgacattcgtacagtagtttggtataatataattgtagtaaggaaaggggtgaaaaaatgaaggaaacaaacaaaaaactaaaagagcttctcaaactgctggacacagtcgagaaactcatcattaaagtaatatcaatagtcggttggattttcattcttctaaagatattacattaagcttcaagggttaggctttgacctaacccccttataaaaaataatatcaaatgtttccttcatagtcaaatgaaaaacttatatgctaaaataataattaaagttataactataattggtttactagcatttttaggtttagttgttaaagcagtattttttaagtaagtaggtgattcggttgtataaatcttttgaaactaaagatgactttttaaatttcttaagtgataatattttaaatacaaatgaagcttgtgaaatacttggctgtaagaggcagaacatcgccgatttagtagaacgccataagctaacagctgtaaaaacatttcctcgagacagaattttcttaaaagatgatatacttgaacgtctcaaacttaaaaaacagagggattaatttctctctgctttttgtttattaagtatattatttgaataatttagctattacatctattaagctaaaactactctttttatacgctttattatatacagactttttaggattagttaaaagtcctgtgcctttcttcccgtaaatcggattaatacttgacttgactgctctcttagctctccctgtagtgcttgcttttatgcttcgctttatacttggttttcttactcccattttcataacgctcacctctaagcatattttaccactatttattaagaatggaatatgtttatttaatttcttttaatgcacctttaactcttttatatactctagccttcatgcattcccttaaatcgtctgtgacttttccttttacaagccttttactactacagtaaggacatgctatatatctatctttttgtatagattctacatcttctgttaataaaacaaattccttgctacatgtactacatttataacttgtgtaaatactctgcatgtcctcacttcctttatgtaaattaaagcacccgattaattcgagtgcttgataatatgaatgccctatcttttcaataggtctgcgtcatatgtccttttggttttttgacttttgccttatatatttttctataatactattataaggcttgattttgcttagtggcatgcgttttttatgcgttttttatgcatgattttttgttttttatagtacactctatgtgttcatattataatatcttcattcacataatgtaactttttattttcaatctctataccctcatccgatgtatataacctcaagtacacaggctgattgcctatgcttttcttaatctcttttgctagatataaaatttttatgctgtgtgtttctttactatcagtaatattttcaactagtatattttgtttgctaactaatttagggctttcaagtcctattatgtctaaatttttgtatatcttcatacctttttctatatagctttccatattgtttgcccccttagcatttttcccttttttattctatatgaattctacataaaaaaagaaataccctttaacatttatatgataaatcagaattattaaaaaaagagaagctctaaagcctcccctttttactttctagtagtactaccaattatttcgctacactgatttagactatgtttttaatattccacgcttcccatgcagctaccttttttattgccttttttcttcgcctagaaacttgactttgtgatatgtgaagcctattcccaacaacccagtccggcaactcttctttgtattttaatattaaaggctcatatagatattgatgtaagctttctatattgtcacctataataacactatctacttctatatttcttatttgctcttctatgtcagctatttcttccttcttgcggtctctttctattattttcttttgaatgatattcataagtgttctttctgcatagctttcacctgtggagcttgtctgaactctctcctcatatgttattgctcgagactcttctggaatttctatatcagttgtctttaattgctgttcaatctgatctacttgcctttttaatatacttgctttatgtttaagactatttattactctatccttcttaaaataattatatattttacgttctgtagttttaaatatttctttgtccaaattatcaactccttaaataataaaatgggtgaacgaaatgggcacccctagtaggttgtttctttcttgcaatcttttattattatttgattattatttgataatacaaggtgctagatgtacctaacaccctatatatttaataccaattgcccactttctagctctttaaagtttataatttctgcatctgtcttatatattccgcaccatataccgctattgaatataatataatggttttctgtctcgaagttaactttatattccttcttaagttctagtggtatacctggtgtagcttttattattcttacttgcatttataccattcctaacttcaaatgcgtaatagatttgcattgtgaacttaatcttcatcctctgaaacttgtttcatttcatccattaatgttttaagttcatttaaatctcttatataacattcaaaacttcttaactgaaacttatctgttttacgtaaacaccaattttcccattttgatatatctagacttgggaatttacttttcacaagtttagttagtagttctctatttttgggtgtatctaataaaacatattccattctgtcttcttggacaaattcatatccgtcatctatcatttgatctaaccggcttttatgttctttctcttctgtaactggtcttgttgactcaaaacttatatccatatcctccaaattcatcactttcttcttttcatatcacacaataaacacatttaaatcataattggatttaataaattttctttgtattccgacgaaactatttataaattttatttagttcccttactaaatcagatatttgttgtactttttctaatactgcattgtattcttttgtatctccatcgaaattgcattgtaacccttgcattgttggagtatcacaataattgaaacctaattcttcactattcatatcaatcattccaattaactctttatctcctttttcaaatatatcaatagttaatcttttcatatttatcctccttaaaattaatacgtaatatattcatttcccgtagttaaaagggaatatcagaattatccactggtgttatatcctcttgcactggcactccaaagtctacattttctatgttagaatctttgccccactcaaggaatttaacttcctcagctaccacctcagttacgtatcttctagtaccatctttagcatcataagatctagtttgtatccttccgctaactcccataagttttcctttactcatataattagccgtagattctgcttgtttaccccatacaactataggaataaaatcagcttcctgttgcccttcttttttaaatcttctatctactgccaaagtaaagttacatgttgccgtacctgtatttggtatatatttcagctctgggtccttagttaatcttccgataagtattgttttattcattttattaccttcttacatatttttttatataacattcagcacataaaagcggagaatgttttgttattgctatattagactcatcaacatactggtatatatgccctaagcaaacacttttgccacatttagagcactttacaactgtatctcttccacatatctcacacttttcatgtttagccattatttattaatctccttgtcatagcaatctctatctccaataacatactgtactgctaatctattaagtatatgagtaaagcttattgcatcctcatttgtaattgtcaatttttcaaatagcattttatgagctaataaaatagctgtgaaaagttcatttccttctatacttgctatatctattttctgaactggttcctgttcttcttcatcacaaaataaatttgctaatgcgctataaacattaattgctgtttcttcggttttatttaattttttcattataattaccttcctttattctctatattttaattttaaattctaattcttagtaacttgagcgattttacgctctttgaaatatttttattcgttttctaattctaaattaaacatttcgtattcatacttagttacttctttataatttaataatgtaaaatatccttcttcatttctatttttccttttaattgctttgaaaggatgttctttaaacacatcatgacattttatagtcccgaattcagttgtttgttcataagctgcccaataaaatttcatattctttcctcctatatcttagtttgaacttttaatatgctctgcattgctgataattcgttgcttaatgccattagcatgtctcttgatgctttatatgtctgctctgctaggtctctactaaactttaagcctgctacattaccacgtgctacatctggtattaatgttacactcataccctcggtcttaagcttaactatttcttttgataatgcgattctgtattctttttccgctgatgcaaactccttagctttttgagttatatagtctacacctttatctagtcgctttgatgtattccaaattgcttctgtaacctctatagtttctattgccatctactcaccaccataagcatatttacatttacaatgttctcctgtaggcttaggcacatcatattgtttaagcagtttataaaccctacaatgtttactatgccttttgcagtctctacagcttgtatctattgctaactctattaagttataaagttcttcttttttaactacttttacatcttttaaatcttcgtttatatataaatccctttgattagtttttctagttagttccgccatcctgctatatattttctttattctttctttagaaatacgattttccataagtgctacacttaatgtttctgaaataatgtcccaagtatatctgtttatttcctttagcttcttctctttttcgtctgcttcattctgtaataattcttgagctctgcttatttccaacatagttttagtccttatatagttatttaaagcatgactttctataaaatttaacttacttaggattccttggacttgcttttctaaatccatttttttcaccttcccattctctgtaaagcttaaaccaattttcatattgcatagtaacaagccaatcacaattattttttctatgtgctactatgggaatttcattctcttttttatctctaatagattgtgccatagcatcatataaattaaggttctcaaccctttttacctctgaatgtatataaggtaatccaattacatcagcatcaccatttaaccctcaaaactgctgacctcttattacattttcatatccctgttctctgcatttagatgcccactctctttcaccattcgcaccttttttctttgctgctctaccaccttttgctttactattttgtccttttaaacatcttattgctacttctaaagcttcgaatgagttacttcctgtgttccatttgcctttttttattgattctaaaatcttagccgcatcctttttattcatcttgcattgttcctcctattctgcttaataattctcttgatcttaaaatcatttatatctctttctttttttcttgcctttgcaacacgtcttttctttataattgaatatgtcttaagtgctaattcttttctttcttcactactcataaaatttttctcccatcatcctaaaaacaatttgttcttttgaatatccttctttttctaatttaataactttgcatatatgtgctgcttgaggtatactgcattctaatacttccgctaatttttccactgtataatggcttttaggtaacatttcataatacttactttgtagggcttttttataccctaaatcaatttttctatttttatgtggtccattattccctttgtgatgttctgtgcataaataaattaagttttgttttatttttaccatgtaagatgcttggcttctaaaaactacatggtgcttttctattccatacgctttcccgcatacttggcaaaagtgtatctctttacacattcttcaagacctcctccattgttatttgtccctttatttcttttggcttttctctgcctagcttgtactcttcaacacgcctatcccaatctgctgttgctgctttttcagtgcttttccagtcgccacatgaaatatgagttccaatattactgcaaaaatacttgtattcactttctataaaatttaatttagctttgccattacatataggacatggctttggaagtttattaccttctattgctttaatcttcataacttcgcctttctttattacttgagtgtcatttgataatagatatgtacagctatagccaaatgacaccctaggtttagattaaatttgtattttatttgaattatgaattaagttaagtagtttttttaatcacaacacccatagcactttcaagtccttgtgagctaagaaattcatcaaactcctgttgtgctaattttttatgtttttcaataatagtatccattgtcttataaacattatctgattttttctttgaaacatcatcagctacaaatgatattcccaactcattaaaagccattgttcctgtactttcatttaccatatagacacttccttcatcttttattcaaattccgatttaaaacgctttcccatgcttatacggtctatctttatttatctccatcttctttttaatctcttcctctaaatctatacctagtccgccgcataaatctccaagtcttattgctacatctgctaattcttccttgaagttgtttaaatcattctttctaagcccttccattgcttctgatacttcgcctgtaataagcataagtcttgtacatatagcattaattttaaaagttttaattgagcttggtgaaagttttgttttgccatacattatttcgtcaataacatcttgaattctttcaaagtcctcccaaaatccatgtgcctttgcattactataagcttctttagctaattcattaatcttcattttctattacctccacccctatatcattacactttacacacgcaaacataaatgactctctgtagtttttgccctgtactgtaaaatgtctattattcttaaatataaccttgccttttataattttatcttctgcatttgcattagtaagacatgttattcttactttatctcctattttcatcttcttctatccatccttccactatttttatactttctaacactccatagccttcatagacaagttttattacttgtccaatatatttgtctatccccataacttaaagccctcctgttggctttcaagataattataaattttttctatctcctgcttaaattcgttccagtgctttatacttccaagatttaaataagcttcgtttttatataaaaccaattgattatttttaattaaatactgcccgttattgccctttgctgtaataactccgttcttttctgttacatgcatattaatttttacgttttggctttttaagtactcacgcctccaccccatataatagttttctgctgttctacgttctatagaaaacattgtttttattttttctattgcctcgcttctctctatatggtccgcattagacttcatccatttattgaatgctttcatatctatctttttatttttaacttttatatcttctagaactgtatttattttatatacacttaagccaaatcttctgctaagctctgtaatgcccattccgtctttatacgcttctcttatttgctccttaatagatgcgcttattttctttctcataaaaccacctcaatacaatatttttctaagaagttctgttttcttcttagcttcctctatccttatacttttggatgtattttcaaccggcgtacacatttcaaatattctactttctgtgcgctcatggtattggtccgctaataccccatgtcttttgcttggatttatttctaaatttgatgtaattataagtggtaacttgcttctatatctgctatcaactatgttatagatcatgctcctggaccattccgaactcttttcagttcctaaatcgtcgataattaataaatctgcatttataaaacttctaataatatcgctttcagcttctttcccccagctgttgtatgtcttttgtatcctgcttaaaagtccatttatgctaacacatacaactggtatatactgctttaaaagctcatttgctattgcacttgcaagataagtctttccatttccagcgctaccgtaaattaataatcccaatccttgttgcttacattctttaaaattatctgcatatcttctccctaagttatacatgcttctggaacctttattaaaatcccagttttcgaaattactttctctaaacttttcatccatcaaactatttgttattaactcattaagcctgttttgctttttaagcatttcttcatgttgtcttttttcatgccatgctttactctcacactcacacattgtcttaacaatcctatctatacctaagatagttactttcttataaatattcttaccacacttagtgcaagtttcttcaagcttattacagcttgattccgataccttctctgtccctgtcggtgttatcttgtttagttggtccattacttacctccttatcgttgtatcttccctcaagtacttttgtaaaatttgtatcattcttaaatatccaatcaaaatctacaatccattgcttaccattaccaccttgaagaaatttagattgttttatattattaattgcttttagaatatcctctatagttagctttaagctgtttattctagccttaaccttatctttgcgtctatccgtgatatttctaagaggtttaataggactaggtaaatcgttccatacgataagaatatcctgccaaggtattctatttacttcttcttctccttcttctttcttattcttattcttctttctcctttcttcttctgttgcgttacattccgttactgtaacgttacaattagcgttactttctataagtttctccctatatttttttactcttaatcttgtttgttctcttactttatcaagggtttcaatgttttggtgcttctcccaattagtaatatagtaagcatcatttataatctctatcatgccaaattttttaaatgtttctagtgcaagtcttatagtatttaaaggcctgttaaataaactacttagcatttcatcagtgtaatatattttatcgcttagcatcagcaagccacttctatttgtcttaccagataagcaaagtattttaaaccaaattactaacaatgcatcagcttctggcatcttttcaatcaactttattttttcatcatcaaagatattaaccactatcttgatccacttaatgtctgccatctattcacttcctttttatcgagagagttttaaaaactccctctttgtgttataatttatcttggattttttattttgtgccctttgccgagggtattttttaatgtctgcatcttaaattttcaatttgttctttaagcccatctatattttctttaagttcgtctatctttgctttcaaactaaaattttctttatctatttcatagtaacttgggctgtcataaacctctttccatatctcttctagctctttatcatcagcatctttaagatattttaacgctatctcttttactatacttgattctctgatttctactgtattgctgttatctcttatcactacagctccattgttataatccacttcatcccatttacttggacatataatactatttatatccacctttatcacctcacttttgatgttccatacataatactttgccaaatttactcttactgtagcttgccactttttcgcttacgcttttaccacatacagcacacttgtaagtattgctattaggcttcacagtagcttttttatctaaaggtatactaactgtagctttatctatatcagtgcttattttagtccctagcttgtatctaaccacattattgttatctactatctcaagttggtttatttctcgctcttggttataatttattgacttaactttaaaatgtattttagggcttaactgcactctgcctttgttttctgttacttcatctggttttaagcctatccatataaagggacttgtatataattctctgcctattccaaagttgaaacatgcccttttaaagctgtctgatgcttgacctttttccttttctgtattgctttcagttcctacatcttgcttactaatccacatttgtttgtcttcatcataaactcttacagtacagaaaagattgccattaactaattgatgttctctttcccacccaagtactccaaaggtttcatcaagtattttcatatcacaccttgcatctttataaagcagtaaaacacatccgcttttctttacgctttgcactctacattctatctcacttgcttttaaaagccttatatttgccatttaaaatatgtcccccaatccttcgtatgtttctttacttatttccatatagttttttctttcagaaaatcgcttctgccataccaaactactagttttataagtgcatccatttaatatatttgcataatatttcatgctatcacttcttttcaataactctgcttgcccacatatcagcaaaatgtaaaagcatttgtagtgatctttctttgccattaagctgatattttaaatcgctgtacatgccattgtgataaagtattgcaaagttttcttcttctgtaagctctataaaatggcttgctatttgtattgatcttatttcatgtggaactgataaaagattactgtttgtagtaaatggtttcttctctgactgaacatagccgccttttctgtccgatattaagtttggtatataattaagttttccaaactgtcccattttgcctagatcatgtagaagtgaacatattataatgctgtctcgtttttcttctgtatttacccattgaagcccattgcatatatcatttaatgcattaaaaacatttaagctatgttctgcaagtcctccctcttttgctaaatgatattgtgtactacatggtgctttgaaaaaatcttttgattccatatacccaattaagttatggatgccttgcctttctgtagatagcagcaatcttgttattgcatattttatttcattcatctttatacctcccaaatactaatctgatgtacatagttctgtactatgcctttcttttttaacttgctatactgttttgctactgctaaaggtgtcctgtctaatgctgcagctgtaattaacattccatcatagggatagaagtttataatataatctatctcctcaagtgtgtaaggcttagaacgtcttaacataagaccacctcattaaaaaattcataatattccgaatatattctatggttttaatctgtataaattatctcccatactcttctatggtacttaaccttttcatctgctgtcatatatcctagcctctctattgcatctaaatatcccataaaatacaatctagcttcttttgatgttatttgcttatgtttaactttaacttgaattttttctagtagtgagagtactaaatcgtcttcctctttactagtcatacagctacctccttaattctttcaagcacttcttacatatcttctttcctttataatttattacgtcgcttgcttcaccgcagaacacacatgctggattatatttctttaagactatctgctcaccatctacataaatttctaaagcgtccttttctgctatattaaatgttcttctcaattctttaggtattactacccttcccaagctatccaattttcttactattcctgttgatttcatttttaattcctcctttaatctaatatccataaaatactatacattgcataacatcctgctataaaagccattattccaagccacatacacacaatttcttttaggtctaagcttttaattacatctttatatcccatttggatgccttctttccatataaagcactccgcctaaatccgatacataataatcttttaaatactttttagtaagttgcactctttgtttgtgatctttgtatggtaagccaacaaaacaaggcaatttttttctaggcatttttctcatcccctatattaaatttttttgtagcttgtccatagcttccaggtattcgctctcagttataagctctttttcacaatctagctttaaagcttgtattgctctagcattacgtttcggagttcctatgctatatacaaaacctggtctatcaacaataagattgttattatcgatgtctatatatacttccattgtcaaatcctcctttccttatttttacaaaggttttattgcacttttgtggaatatatcaccatgaaagtgaggtgatatttatgggtacttacagaactgctcaaatctgccttaatggtcatgagataactacgtcagcaaacacttctcctgaacttatggaaaatttttgttcaaaatgtggtgcagctactatcacaaattgtcctatttgtaatactccaattcgtggatcttatcatgttgaaggtgtactttcattaggacatgaatataaaattccatcatattgccataattgcggtaagccgtatccttggactaaaactgctttagaatctgcgaatgcattaattgaagaagacgaaaacttaaattcagatgaaaaaaaacaattttgtgaaacattacctgatttgattgtcgaatctccaacgcctaagacacaattagctacagctagatttaaaagattaatttctaaagctgctacatataccactgatggtgttaaaggtataattgtgaacattgcatctgaagctattaaaaaatctttaggactttgatttttctaaattaaataatttgtatccagggcatttatcataaccacaattatatgatttattgttcttaacccaacatttaggacaaccatcatgtaatttttctcctgtatctgatgagaaattttcttcaagctgctcttgagatttcacctcaggggcagtttgctttatctcttttacaatttcaacattattgaagtaccaatttaaggcaaacctttttagttcctcatgcttaacaaatataggcatcttttcttcatctatttgtgtaataaattcctttgattcatttccaataaaataaacatcaatccatgggtatctctcatcaacttcgaaacttaatactccaatctctacaacaagaattgttgattcatcaatattgatatttgtgtccgttgtttttatttttttattcatataatttcctcccttatactactatactgtttttaatggcaatgtctttaactatagctacatatatttcaataagtttcttgtcatttgctataacatcaagtaaattaagtttattagcctgtgtctgtgtgcctccatttaaaagcactctagctctcatatttttaagccttttatttatgtcacttcctgccctttcatcaagagctttatatatttctttttttattccctcataatttttgcttttcatacaaatacgattaataagaatgtttgttttctttctccactcttcactcggatttattgttattacatctttcatattttgcacttcttgttttactgctgttgtctgctctttagtttcctctagttgtaatcttaaatcttttaagctctgtgcttgcaatattattaaatcctctatacattgaggcttgtcctctttaagtttgttttcacattttatgaaatagtttctgtattcgtgtgatttttctgtttttgccatcattgcaatatgctttgcaaattcaattgatattgcaaaatccattgtttcattgccctcgtcattatgacgaacccctatccagtcaatattttctttaaaaaactcattgctctgtatattttttggataccatcttgaccaatttgttttgtttagccctaatcctaaatataactcctttgcacttactaatcctttatcagatattcttattaagttttccaatttatcactccttttatataagcttaattactcttgattatctgcttctagtttttttattaaacattctaattcatcttttgttaatttatcagcaataattttgccaagtacattagcatactttttttccaattcccttgtatccttaggcaaaacaagaactacttcatacatttttataaccccccatatacttatctaatttatgttatgcaaaatataaatttccgttacataataaaggttctataaaattaataatgctaattctgtgtgacttttctttttaatttatttcttatcttaccgttttttctcatatccctaacacttttgtgatagttgtatgcctctgtaatttcctctagtgaacatttatatattctagttagtgcttgtaatgtttctacagatggtagcctatctgaatattcatactttctataactcgcctctttaagactaagtgcagctgccacacgttcagctgataatcctgaggcaagtcttaaaatcttgaatgtaattatacgttgtctattatccatatgtgttcctcctttctggtataattatcactcctttcgtgataatattcaaacacatagtgataaattatcacgatataatgctaaaatagcttgtacaatttgttaatttgcgtgtattctgcctaaaaatatttcaattttcttgacttttgtcacagtgtgtgacaaaatagacacagaaaaaataaagaaggagaactaaaaatgcttggtgaaaaccttaagaaattaagaaaagagaaaggtctaacacagagacaacttgctggtgaaacagggttatctgtgagtataatcagcaaacttgaagagggaaaaaagactggatcaattgaaaccttgcaaacattatcgaactattttaatgtaacggtagatgaattaagtgaaaataaatctgcaaatatcgataaaaaggaatatgccgtggatgaattactaaaaagactcgtaaaaaagggattaattgaaaatgttgaagatatagatagtgatttacaaaaattaattacttacacaataaaggaaactataaataaaataattgaagaagagaaaataaaaaaagaacaataaattcattgttcttttttacatttaagtattttattctcaatattgtccacaataatatcgaggtgtctcagtatcttatctatatcatcaatttcaagcaaaattttctttagttcttccatgtacaaacctccaatattaatattatatggaagttataacactttttattataaaaaacaataagaaaagtgacatactttttgtcgaatatgtcactactagaacgaactatgatacgcttggactacctattacaaaacttacaataggtaaagctaacattattgttaatgatgccaatgctagaatattagttttacctaagaatatttttttcatagaactccctcccctcgaaataattatatcacaaaaatgtgatattttataattatgcagtgctattttagcacgctttcaaaagtattacctgaaacatactccattatctctaattttaagcttgaatctagatctattccttttgggtttaaaaagtctattatctttgtaaaaatttccttgctctttttattcctaatagcataatttacaaattgctttacgttatttttaattctgaatttgtcattagtatcatacgctaataaaataacctttttaaaggtatcaaaatcagcagtattgttctttattttaaagccaaaaacattatcataaacatttaacttataataattatttaatgaatcaaataatttcattgcttcatctaaatgtaatttggcttcattaaatttattttgctctgtgaaaacatatcctatattactttcacttgttgcaacgtattctataaaatgatacttttctgcctttattgctattttttcatattctttaatgctttcattaatcctcccatctgtataaagtacattggcttttattattgaagctttaaagtagtatttatcaaaaattttaagcttcataactctagatgcaatatctatggaggatttatattctctaagattatagtatgctaaagctacatttaaaaagcacttcactttagtttctctatctaatatagagaaattttttaacgagttaaatgctgtaattgcacgttcataatttgccgttgcagtatatattttaattagttctatattaacttttaaatatatatctgcatctaaatcatattgcattaattttgttaaatattttaatataatattcgcatttttataaacatcttgtatatctaatttttctattacattccaaataacttctatagctttgtccttatatagcttgtctatcaatttatcaaattccaagtaatgtttttttgtattacttagaaatttctttactgtactgtctattgtttttgtaggtatccctagaattaactcaatatccgcattatatccaaagtccttaaatctttggataaacttatatgcctgagctgcatttaaaggtctttctcctctaataattttatttatagttgctcttccaagatatttgcatgccaacttagtctgacttaccccaatctcatcaattattttttttaatctttgatgaggttctaattctgtacacattatatccctcctattctagtaatagaaaggcttccacttatttgtgttatgtgttattattgtaaatgggaagcacttccctttttggaactccgtaggtatatggtctcgcaaacttctacctacggagtttctctatcattaacatttttttataaaaaatatgattattactataattttaagttattattatttatttaataatttcctataagtttataatatcatattttagattcagaagtcaaccttttttactgatttatgttacttttatattgacttgtgttgcgaattgctatacaatatcaatatgaaaggagtttttttatgataagttataagccattttttaaaacacttatagataaagatttagagaaaaaagatttagtgaattctaaagtaatcagtaaaagcacaatgacaagaataaataatggagattttgttgcacttcaaataatagataaactatgcgaacacttggaatgtaatgtaagcgatataattgaatataaagcaaaaagtaaagaatcttagaggtgaagttatgaaggtagcgatttacagtagaaaatcaaagttcacaggaaaaggtgattctatagaaaaccaaattgaaatgtgtaaaaactttataacatcaaagtataacaaaaaagtagaatttttagtttatgaagatgagggcttttccggcggaacaataaaccgaccacaattcaaaaagctaattaaagatgtcgaacttgataagctagacgtattagtatgctatagattagatcgtattagtcgtaatgtatctgacttttcaaatacattggatacattacaagaacatcatgttgactttataagcataagtgaacaattcgatacttcaactccaatgggaagagctatggtgtatatagcctcagtattcgctcaactcgaaagagaaactatagctgaacgtgtaaaagataatatgattgaaatggctaaaaatggtcgatggactggtgggaaaatccctctgggatttaattcaaaacgaattaaatatattgatgaaaatggattagaacgagaaatccctgttcttgaaattaataaagaagaaagcaaatttgtaacctctttatatgaaaaatacttggagcttggaagcttgcacaaactcgaagtatatattacacaaaatgaaataaaatcgagaaacgggatattgtttgagaaatctagcctaaaaatcatacttcaaaacccaatatatgtaaaatcaagttatgatgtacttaaatatttaaaaaacaacgagtggaaagtttatggtaatcctgatggcgcgcattcgttgttgacatataacaaaacagaacaaactttaagaaaaggcaaacatataaaagtagacagacctaaagaggatcgatttgctgcaataagcaacatacttggttttattgaacctgaactatggttggaagtgcaaaagcaattcgataaaaacagaacttctttcccacgattaggtaaaacacataatgctttacttacaggtaaaataaagtgtggtaaatgtaagaaatatatgctaattcagcatggaagaatttctaaaaaaactggtgaaaaagctttttattatgtatgttcattaaagcaaaaatcacataaaaagctctgcaataattcaaacataagaacagataaaattgaaaatttagtattggatagtctgaaaaattttgcgaaatcaaaaaaagaaattatggaggctttaaaacgagaaaataattataaattaaaaaataataattccgatataaaattagaattaaattcagcactttctgaaaggaaaaagcaaattgatagattgacaaatgcacttgcaaacggaaccggcgtagaggacatattaattaataaaatcaaattaataaaaaaagaatgcataaagatagaaaataaattatctgaaattgaaaacaatcatgaaaaatctaaatcaaataagataaatttagatattataaattcaatgttagacagttgtaaaataatagatactttatcgatgcaagagcaaaaacgtatcattgacactttaatagacaatatatactggtttggtgaaaatcataaagaaggtaaaatatcaattgaatttttgggatctggtatggatgcaacctataaatcacatttgtatgaagctattgatttggatactaattcaaatggcaaaaaagcagcattattggataccttgcagatgccaaattaatgacctccttctatcctcttgaaaagttaagaaaaataaaaggactagaaagcgtaaagtatatagacccttacgcaggaggaaaaggaaactctataagatatttatctgttgccccaagaactaatgacatgaaagtaaaaggtatcgaaaatttattttgttgtggagaaaagagcggattgtttgttggtcatactgatgcttgaacccctaaaatacaaacacagttttattattacaattttgtatacataaaaatagcttaaaggactattttaattttaaatagtcctttaagttttacatagatctacttggaattatagcatctattacacctataactaaagatgctaatattgcacctattatagaaacacgcatgtttggtactaaaaattgagcaaggtaaattattacagctgatataataaaaccctttaatcccttaccaaaaggcgatgcatctactttcataaaagattctactaaataatctaaaccagttattactacagatgctaatacaaaagtccaaaaacctcttatagaaaatccaggtgtcaaaaatgatgttatagccaaaattattgcaaagagaaccaatcttcctacccaacgcattagactattgttgcctttgccaacatccttttgaggttctctattactattattctctgacatttcaccatctctccttttaaaattacaaatctttgtagcaattatagtatacccgaaatagagtaaaatataatttcaaaagaaaaagacaaataagaactacttagtaagattgttaatgtatagtaatttgtcattcttatagtttcatattaataaaaaaaagcaaggcttgtacattttacaagtttccttactttttaaaaagctctattttatttcaacggaatatcgaattgatatggttgaaattgtacattataatctgatgaactagctgtaattgtgaattttacattatcaccattaagatcaacatttttaaacacaagaacaccctgagattttattccttgcattagttcagtttgtatttgaggataattcattgctgcctcatcatttatatctaattggctagaaccttgaagtaatttactatcaaaagtatttactgataccgtattagttgtactattacttaaatttaaataaactcttgtaaccgtcttgcttacttcgactttgctcaatgtgattacaaaaccattttggttttcatctttatttatttgtatagtcttaacagctggatcaaatgcttttgcgtaatcagttttctcaattttagttgctttaatggttggagttccttcagacacagatgacttgtcatcgctagaacttttaacaacctttccaaagacatgaattatatcatccttttttataccatcattattatttttgatttttacaattgtattcatgtttaaactattttcagcttcacattggaaatatacaccaccatctcctgatttagcatcactagtaaccttagcataaaaattagcttttctatctacgtacgagctactgccagcagtatacattttttcaaattcagattcagataatacttttgtgttaactttaggttttgtctgctttgatccacatccagcaaaaacagtaacaattatagatataatgcatgttaatgctaataatttttttgatgattttttcttaagtaaactcattattgccctccttaaattgttaattcaatttattttagcaaatcattgatactttagcaatacatttaattaaattataaataatgcaataatataaaaaaatattaaattttattaaattgaatacataaatatatataattattaacacattatctattaatataaatagttgttaggtaattcttgaaaaatccaagctatattaatgctattttatacatgttttcaaacacttaattgatttttataccaatttaatataaaattttgttgaatggttatttacttactttattattattttagttccttagggaactttttttataaataataaagcaagtcatgtgatgtagtgacctgctttaactattaatcttatcatttttattaagttcatttagaattttattaattatctcttgtggcaacctacttttaagaattttagctactatttctatataaatttcttgaatttcttttgtattattagatacattcatagtaactttttttatttttaacatacaagatcacctttaaaacttagtaatttaaattgtatcctcatctataacaaccgcttgagctacaataacatcttctccattaaaggtacaagaaggagatccataaagtttatatccttcatttaaaagtttagaaattctttcacaaaaactcgagtcgtcctttcctgtaataagtctataccttaatttttctttcatgtactttcctcctataaatatactccacattatttataaattataacatagtatagtaatattatcttttgactctcaatatactttataaaaataatttgatggatatgatattttgaaagtagcaatttatagtagaaaatcaaagtttacagttaaaggagactctatagaaaaccaagttgaaatgtgcaaaaatcacataataaatcgtattggaaaaaatgttgattttttagtttataatgatgatggtttctctggaaaaaatcttcataggccaaaatttcaaaaaatgcttattgatgctaaggcaaaaaaattcgatacacttatatgctacagattagatcgtgttagtagaaatatagctgatttttcaaatctaataaacactcttcaaaatttgaatataaattttataagcataaaagaacaattcgatacttcaactccaatgggaagagctatgatgtatatagcatctatatttgcccaacttgaaagagaaactatagctgaaagagttagcgacaatatgcttgaaatggcaaaatcggggagatggcttggcggtcaaacacctttgggatttaaaagcaagcctattttatattttgattatgaaaatcatgaaaagaaaatgtttgtgctttcacctatagaggaagagcttacagttgtaaaacttatatataaaagctatcttaaatttcaatccataagtaaagttacaaaatacctaattcaaaactcaataaaaacaaaaaaaggaaatttaatatggagtaaacgttctgtaaaagatattttgaataatccagtatatgttcgtgcagatgaaaatgtaatgaattttttaagtaacaaaggaataaacgttattggaataccagataataagcatgcaattttgacttataataagaaaaagggaataaaaaaatttagacaaacaaatgaatggattgcttctattagtaagcatacaggaattataaattctaaaacatggcttaaggttcaaaaaataatgataaaaaacaaatccagagctccacgaataggaagtacacagaatgctcttttgacaggattacttatctgtaaacaatgtggaaaccccatgaaaattatacacggtcctttagacaaagaagggaaaaaattgttttattacaaatgctccttaaaagaaaaaagtggcaattctaaatgctgtaattcaaacataagaacagatgaaatagaatcagtagttatacaaaaattgcacagtatttcaattaataaagatatactattaaattcattgaaaagttttagaaatctagataaaaatactgaaattcaaaacataaaaaaaattgtaaaacataagcaagataaaattgataatcttataaagttcctttcactatctcctagcatatctgaaaatgtagttcatgaaattgaaattttaaataaggatataaaggaattgaacttgaaacttgaaaagattattaaaacgaaagcagattttgtagataatgaagaagtctcaaacttaattttagaatctcttaagagagtttatattaacaacttttttagtattgaagagaaaaaattgattttgcaaaaaattgttgactatattacatgggatggtgataacggaattgttgacatccaccttattaatgaagcttcttttttgcattaagagatgtcaagcagaagctatatgcacaggaagtcttgctggacataatgctgtaagaaaattcttagaaatgtctccattaattcttccgcaacaaacttcacttggtgatattatttcatatgctaactataaacttatgacaaaagagggccgccgcaacagatatacttttgctggtgctgaatatttcaagagaatgaaggaaattggtctatactctacagacacggatgaaataaaagataaaatctcatctcttcatttaacaaatatattcgataataaattactataataaatatatactgtataatttttaggtaaacaaaatataaggaggattaacctttatttttataagctaatcttccttatattatccttaaataactagaatgttattgtatcaggatcatggcctattctaactcccgtattaagagattctatcttcttcatatcttccttagatatttcaaaatcatatagatcacaattttcctttattctattctcatttattgatttaggtattgtaactactcccatttgcaaatcccatctaagagcaatttgagatatagtctttccatatttcaaagaaagttccttcattaacggtatatcaaatatttttccctgcattaaaggcccccaggactctaattggattttattctttttgcaaaattcatgaacctctgtctgaggaaattgaggatgatactctacttgattaaccataggaactatttcacaatcttctaatatttcttctaaatgatgtactttaaaattacttacacctatagctctaactcttccatccttatatagcttttctagtgctttccatgtttctttattcaatgttttaggccagtgaattaaatataaatctaaataatctgtatctaatctttttagtgtgtcttcaaaggctttcaatgttttatcgtaaccatgcttattattccataccttactagttataaaaatttcatttcttggaataccactttcctttactgcctttccaactattggttcattaccatatactgctgcagtatctaaatgcctatatccgactttcaaagcagtttttatatagtctacagaactttcttcatactctattttataagttccaaaacctaaccatggcattttaacaccattatttaacaccgtaaaactattaatatctaacatttaactacctccttaaaactatatttgttataattataacataaaaaaaaaccgcaattacttgattgcggttttttgcacttaggtttactttaaaatttactttacataatttttattatgtaatatataatataaagttttaaaaatagcttcagaatatttataaatttttcttattccgagtttttctataaaattcaccttacaataactatcctccaaatcaaaaacaactataaaactagcattccctaattttaaactaccactcgcagtttgtatttcataaggatcattctttaatactataacctctctttcatcatgaaaatccacagggaatgaacttgcaactaaaattatatatggattatcatatttttttagtattttattataaatttcttttatgttgatttcatacactggttctttaagagttccataaacattagggatattcctttcatgtaaaagcgtgccaactagtggtgctagtatatttccttcaaaaacaggatcacctatgcatattacaactatctcttcttttttgcctgtcatgctatatagaaatttaaaaaactcttcttgtatatttttctcataataatatttttctaaatacatattatttatcccccttattcatcctcgcaaatgttaaaactaggatttttgaaattattcttgctagctttaaaacttcatcaaatctacattttttaagaagttctattaaattatgttctctttcatcttctttgtttactactccaacaagagaaaaatcaccaacagtaggaagttgtctataaactccaaatcccggtgtaaatcctccatttctcagtacaatatcatttatattattttctgcagttacagcagcatctacaaccaaaatatatggattcttaaacctttcatgaatttcatctaaaatcttaataatattagatgcatttacagttctatctaaagttccatatacatttggaattccatttctctttagtatgcttccaactaaaggacctaaggaatctcctactaaagtatctacaccaagtgaaagtattactatatcctccttatcttttagtacctgaaataagattgctgaaatccaatgttcaatattctccttgtccacattgtagctaaaataaaatccatttctttttagttgtgatttgtcgtcaaaatgttccatataaaatcctccttaaataaaaataaagctggcgcaatatatagatatttgcaaacagcttgtcggtttaaaccaatttagattagttactgaaatattgatttctttcagtaaattcaatttgtttatattattatttatatgttatttttaaaaaatctctaattactatttaaaatctttatccagtctttcccaagttttaaatttatttatattatcctcatctaaataaattactcttgctcctctttcatagttacttgcatcatatgtatcatatcctgtacatctaccatatcccataattatacctttgtttctgcctataaagttattagtatgatcatgtcctacaaatatagcttttacatctttttccttctgcatctctttaaaaagaccattatcagtactttgatgacatatcttctctcttttttctccacataatttttcattttcccatgcttcattatactgaattattggtatgtgaaaaaacataaatgctggaactatgtgcccatactttttctttaaatccgtaaccgtttttttataccatttaacctcatatggttcaatacaaccataccctcctttcttactgtagcttcctgaatccagcatatacatattaaagattggattcttattttctgaatccattacaagaagattaaattgtataccatcatccgttattttattcatattatatttatatttcatgtaattttttatcatattttttctctctacttgtaaagattctgtatcatgatttccgagtacggctgcccaaggaatccttctttcttctattggtcttactacactttcaatggccttctcataagtaatatccatgcaataccttccatctatgttatctcccgtcaaaataacaaaatcaggcttttcataatccattaccttctccataaagtgtactgtttttaaatttatacaatcattttgatgcagatcagcaaactgtactattttaaatttgccgcaattatcaaatttcaactttttattttgtaaaaaatccgccccactaatcatattcaaaagaaaaataaattcaaaaaatagcaccacatttgttttgatcactctcttcttaactttcattttttcctccatagccttaaaattaaaatacgcacaaagagcatatagtcctattgtgcgtattttaataaaaattatttcatttttcattaagccacaggatggttttataatacctagataagatattgtctacatgtcctccttcttctattgaatatactacattagaaggtgtaagatctttcttcaaaatttgaagagccttctctgtactaataattgagttcttaagatatatgtttctgcttcttccttctttatttccaatcataagcataaccttaatgtctaaattaacaggattactcttttccataaaatcaattaatcctttataccacaaagaacctgatatacttaccacttttgaaaagcattcagttttataaattgcaaatatcgatataagtcctccaagtgagtatcctaatagaaagtttttttcttttttagtcctatacttattatctatgtatggcttgagcttttttattagaaagttcaaatagatatcccctcgtccaccaaattcacttgaacctttacttatagcttctgcttcccaaggagtataatcatcatttcttactataggcttaacacctacaataatgctttcatcatatacatcctttttacttttattttctataagatccataagctcatttaagattttgattacaatatcaccatcctgcatatatataacgctgtaatgattatctcctttaccgtatgtcggaggtagataaacaaaatactctcttttatctaaaactccattgtaaactctcccctgcataagaatctcctttacaattacttagtcttattttaatatagtactctatatattaaaacatttctacctacagctttaggtttagtatataacaatgctttgctgcctatttttgttttatattttttaatcaaattcattctattgtcttttctgataaatattatgttttattttatacttttctttaagttagtttactttttgtcttatttacataatttttgttatgtaaactaatattgcaaaacatttattattatgcagtgaaattaatatcaaatgttttacttagtcatgaataaccttccaatttttattcacttcagccaccacctctttatttttcaagaaataatttgcaattagctccgaaatatcaataggtatatcccttactatttctttatctttaaacatataatagtttccacctccagctgcacgataattgtttaatgctatattatagtcttgctccatatttactggcattcctttataatttaatttagtaactctttcacctatctttttagatacatttatctcatattcaattccttcccacatatcataattatagtggcgaagctttaaagaattaacatttgaagcctcttttattctcccgttacatatatcaaaataagccgctgaaagctccagtgcatccttaatatcttttcctttaaccttcataacctttaaggtatttggataaacataattagaaactatatctctcatagttactttctttggaaaaccttttgaattactaaacaatgaagttgcagaaatgtctgtaccaccatttatcatttgaactttatttataaattcaattaaagcattatccttaagtctagcttcaattgggttttttattgtcatgtcaccttttattcttccgataggtgtatcaagccaagcctgagtggcaatttcatatttttctgctattttgcctgctttataatcacttgatatatttgaaacagaaattaaagatgatttactttctactatcctccaccctaataaagttttttctgctattatatcaacttttcctatatttttagcagaactgcccggttgaattatagtaactccattaattttcattccataaatctccctatgttgatgtcctgtcaaaagtacatctataccatcaacctcattgcaaagctcatatgcttgattttctcctgtttgactttccgtttcctctcctgtgtcaatatttttctcaaaaccaccatgataagatactacaactatatctactttcttgtcattctttaaaattctaacccattttttagtttcttctattacatctagaaactttaaatctttaattatatcttgattctcccaattgggaatgtactttgtagtaactcccaaaatagctattcttagatctcctctgaattcttttattatataaggcactccaaatgccgtttcttttgtttttgtatctataatattgcaagaaagccatggaaatttagactgttttattgaatcatttaaaatttccattccataattaaattcatgatttccaataacagctgcatcatatttcatgtagtttaaaatgtctataacaggattactaaatcccctagctattttagcataataatatgtaattggagttccctgaaaggtatcaccattatcaattaaaatcaatttactgtttctctttctttcatttttcactatagtagaaagcttcactaaaccaaactgttcttctgagttatcagcataattcacaggaaatatgtttccgtgtacatcactagtctcaagtattactatgtgttctaactcattacccatgtataaacactccattcataaattaagtatattttatcatcttcatatagtgcagtaagctttatctcatattctaatttatttatctaactttaaggatttagcgaagcttttgttatttattgcatattaaatttctctacttgattaaaacagattatggttcaagatttataatgggctcttagcccaaaccccagggcactattctgtttcttttctatggtcagctcttttttgacagactgcttttttatggttcaagatttataatgggctcttagcccaaaccccaggttggattatacttatttctttggtttatgggtctcattaggttggcatttatttttttctcatcataattaatacttttaattctaacaacaaatttctcgcctacagctggagagaaatttgcccaattggggaagggacaaagacaatttactccctttcttattgttaaaaatatgccataatctttaatacctgttactacccctaaatactctccacccttatttaaagactttacaattcctagatatggatcttcttttgcttcttttattgaaactactactatattattatctatatcaagttcttttattatagccggcactacatctccaacttgtacatacttgtccactttatcaatatatccataatctatttcatttattgggactctgtactctataccataacaatcaactctacagttatttctccctacagatgtaactcgtacaaaaattttctctccaactttatgtttctttagttctaagttttttctaagctccattgcctcttttcgtgaagcgatagctgttctattttcatcatcaaattccataacaataaaatctatttcagcacctatcatacttcttataactcttttgtcttctcttgatacattcatttctcttataggtattagaattttgaattcatcataaaacactacgccacaatctacattttcatcttgtcctattttaacattctccattgctgctaaagttcctgtaagtatttttctactttggcgtgaagccattaaattgtactcattgctatttaattcatttctcataaagctatcttcctccttgaattataaaatcatcattttttaccataggttaccatcccatgattaaatttcacagagttttactccatatttatattctagtttgtaaattctatttaaaacttacattatttatgccacatttataaaataaaaactctgcaatatttctattacagagttttcttctaattttttatagatattatttttatatcttttatacttctattatcaggtaaattaacatcaatactgtctcctacatgtttcttatacaaagcttttccaaaaggtgaatcaacacttatgtattcgatatcctcatcttcaacacttatgttaagagttgttacaagcttagccttaaatgtctcgtctgctcctatttttaaaagcatttctgatcctatgttaacttcatcatcgattttatcctcttctacaattattgcattttttagcagtctagatatttgaccaagccttctgttgttatgatagtattcttcctttgcagctttatactctgcattttcagaacgatctccaaaagctgcagcctccatttttttctttgctatttcatgcctcttaacagtattcctatactcatactcttcctttaatttatcataatcacttttagtgagcattcttgacattattaaacacctcttaatccacttaacacatatttaaattattttctaaacattattatactacagaggaaatgaaatattaacaactacttttgtcttaactatccactataaaaaataactctttatactggattgtcagtaaaagagttatttaattaaaataagattattacttgtgtttatcttatgaatcttccaatataaaacaaaggtaaaacactatagtcaatattaacattagttgttttacttccataacttcctctaattacattatcaacataaaagttatcttttgcttcattattatcaaaattactttcaaatatagcatgagcgcagccagatgtcatattatctatactattactgataatagcaatatattttgtattatagtcaacaaatatagccgcattgctattcaaatcccattttatatttttcgaaagatttttagaataattagaatcctttggttcatttactccataaccactatctattacacaattttgtactacatgcaaattgtttgacctcaacatatatattcctacataatcacacttactcagtttattactaactattgtagaatctgctagttcatctatttcaataccaaagtatgcaggattaattatcttattgttatctatagtaaaacccgttcccatataggtatgattgtttatttccggattggtatgctctgtttccgctgctacctttatacctgacaatgcgcaattatttattatattgttttcgataatattattaaaagctggtatagatacaaagataccatgggacttggaatcattaattgtatttccacatacttgcgatgaattacacatatagaaagcaattcttgttcctattatagtattatttaataactttccatagcgctgaagtgctaaaatcactccatctccttcatttgtagaatatactgtacaatcctttacaacattgtttttatccagatctccattttcaactgcctttatagtatcttcatcgctagaataatccttacctgcaaagtaaatagaaaaattactatttgaaccatatactatacaattgctaaccattacattattagaatgtccttctactatagctgtacccctacctgcatatttctgacaatctacagtcaaattcgataccttaacgttatccgcgtagataacaacaccgtctgctgctgtattagtttgtattatctttacaccagttttagatgcaccagttataacagtattattattctttattatcaaagccgatgacaataaatacgttccatcttttattataatatttttcttaccagcactaattgcatcctgtatatttgtataatcacctgttccatcagaacttacaatggtttcattcgaattgttagcatcagctttaacgattacacaaatatttaaattaaagataaaaataaaaataatgcttaccattaaaatcttatttattttcataagtttatcatctcctactccatataatatatcgttaaattttcacattttttacactcttattatgtctagttaactttatttttacatttcactattataatatgctatattaaagttatagcaatatagatgctgacatatttataaaaaagtacaagctatcttgaaacaaagtatacttttaatatagatgaggtgtaaaaactattctagatattgtagacaaagaagattatagagtaagatacattcactttggtttgatatgtttttacatgatagacaaagaaatcactactatatatgtaacattggagttttactttatactattaaatttatatataaagcagatcatatacttattatgcaatgaatacctacgtatccttaagaattaatttgatgctgctatttatttttagttaatttagaaaatataaagatatacaaaactttcattataaagttttgtcgtttataataaatttagtaaaagattttttttacgaattttattataaaaggagtttttatatgaataagaaaattttaagtttattaacttcagtagcaattatctcttctgttgcttcatttggagttcaagcaaaatctgtaaacgctaaaggtgatatagcatctaaattagaggctggtggtgttataccagcaggtaactatactttaaatagaggagttaaagttacaaagcctataagtgctgaaggtgttgtaattgatgcttcagcatgtccaaaaggaaccattgcaattgtggctcgtgctaatataagtggaataactataaacaatgctaaaagacaaggaataagtgttcaaaactgctccggtattacaataaaaaattgtaaagttacaaaagcacaatttgctggtatagaggcaaaagataatgtttccaatgtaacttttgaaaattgcgaatcagattacaattttgacaatgctaacggtggagaggatgcagatggatttggaataaaaaatggagctaaaaatattacactaaagaactgtgtggctataggaaatagcgatgacggctatgatacttatactgctggaagtaatataactttcctaggctgtagagctcaaaataatggttctggcaaaaatggagatggaaatggctttaaattaggaccttgtctatacaagaatcaagatgggggcttagttacagttaaaaactgtactgcacttaataataaaggtgtaggtttccttagaaatcataacaaagttgctcctgtccaatcaggtaatattgcatcaggtaataagggtggagattttaaatgggactatacacctagaaaataatcaaacttttataaaaatccatgaattttcatggatttttatattttacgtattcttaacttcttaccaaaattcacatttctcatttgatctattgttatcctttaacttgtgaggccattctggtatatggtcacttaccttaatggacctaagaaattttgaaagcctatgctttgtataatccatcttttgtagcattattggtttttggcctcttaaaataagtatttcattttcatttggtaaccttaataattcatctggattcatcaaatttcttttaattgacttatccgttattttcccaaaatccattattcctttaaaaccagctgacttactaaaacttctatcatttactgttgcagttcccaaaagcttagatacaaactcagaggttatcatatctgtagctcctaaaaacaatctactatcacagtttcctattatttcagaccatccattattgggatacctattttgaagctgtgctatattttgaaatataattaaacttgatattcctcttgatctcatagttgatattttctttgtaaagtcaggtatcgctcctatattaggaaattcatcaagtataaagtacacctccttttgtgcttccttcggcgtataatcagcatatttaactaattttataaaaagaaacgaaaaaaataaccctgctataaaatcaaaggtagattccatatctgaggttatacaaaaataagcacatttctccttcttaggaagggttaaatcaatatcactttcagctgaaagctcacacacaagcttgttttgaaacacttgaagttttgaaccaagccctataattactcccgattttacattttccgatgcctgtgagtaaatattatatggcatttttgcctcatgtgatgatgagagcgttctaaataaattatcaatagatgctgtatctcttaaagaaagcattgagtatacagctgataaatttctttcttcctttggattttcttttacaacataaagtacaagtgccttaagaagattcatctctgttttctcccaaaaatcatcctgccttgaccctaaggttcttgtattagctattacagtttctgcaaaactttgagctgatatttcatctgttatttctcccaaaggattccacctatcagaatttctcatattgactaaattaaaaactttaactgtatatcccatatctcttaaaaactctgacatagattcaaaaatttcaccctttggatctgtaattaccattgactgattaagttcacttatttgcattatattaggtcttacaaagctcctacttttcatactcccagaagcaccaaatacagctatattcttgttaaagaaagtgtctttgggcagtattaccatcttatttccgaaaccttcttttatgcttccaaaaacaagcccttcacccccgcctattgtaagcacttttttaatttcactatttttcatccaatttgcagttccctgcgttccattgtttctcaaatgatttatccctttctcttcactatccatatttctataaaggaaaacaaacaaagaaattccagaagtaaaaagtaagaatacaattacaaaatcattacgtatatccaagttatttataatagtattaaaactaataaatggatgcttgtacatgttaattaactcattaatatcgatgaatttgtttaatgaacttctcttaataaattcacttctaatcactataagcggcgttaacaggtatatacatattaaagtatgtaagataaatatacaaattatcaatctataattaaactttttatgcacacctaaccacacccttccatttatcttaattcatacttaaccttaagttcacaagtaaagaaacttgctttagtaaaacactctttaaatccaagtctagcagaaatagctaagaaataattttcatactctttagctatcacaaaattatcctttatctctccacagtcttttataataacgtccccaactttaggcattatagatttaattttaaagttgctataaaaattttttgccattgaaaaaacctccttttaaaaaaaattaagtacaccatcttctatagtgcagcatttaatttgtttattaatttttatattttccttctgattttcttcagaaagaactacgatgactctctctgaaactcccctatttatggcacttgagtaaatggtctcctctccctcgtttataatagctacatcaaaaactttactatttctaaaaaatgcaattgtaaacgggaaatcttgtggcatacaccattcaataggaatgcctccattgtttaaatgcaagtaactgtatagatccaaagctttaatcatttttatattgagctcctttttcccatctagtacacatatatcattaaatactagctttacttttctttgtcttattaatattttaaattggttgtctatatcttttatattgagaattcttttcatatgttctattcttgcaactccaaatttctctataaatttaagtattctttcctgctttaggttaatataatacacgctcttcactccttcatattagaaatttatatattgttaaaaccatatcttatttcatattaaattcctaaagaaactactacaaaggccattaatatatatggaacaaatgctaccctctctttttttatagctatattttttataattttaaaaataccataaatgccacataaaaaaatagataaaattagaacttctatgctcttataaaatccaattgatatgccacatattataaatatttcaacatcgcctaaaccaataactttaaaaagcgcaaaaatatacgaaattattcccattgctactgctcccactacataatcttctatacaatttccactaaagtaagttatcattacaaacactgtactaaacaagaaagaaataattgtgataaaaaagtagacatttttagttttaaaatcaataagcgctgctaaaaacagcatagtagctataacacaatgtttaaaaaactcaaaccctagcatactttttctatagaaaagacaatatattagccccaatatcattgccacaatactacattcttttgttgtgaattcataagtaagctcttttttgcaaatacctcctgcaatgttcacagtcatatatcctatagcaataccatatataaaagtaattaccacagcataacctccttttttctttatataaaaaatagcggataggcaattttacctatccgctataaatgttaatttccgttattatgaatttctttcattatttcatcttgacttttggatgcatcaatttcatcctgactagtaattttattctgttgatcttgattttggactgccggctgctgtggctcattcacaactggctgtgaaggctcctgcgtaggatgaacagctggagttgtagtctgagttgttcttctcgtagtttgtgactgtgtaacatttttactttcttgtccaactcgattattatttggtttttgtgatgtattatttggcgagctacttttactagttttattacttgcagtattagatgatggactattagctgcccctgatgtatctactttctgattgctatcctttgattgtggtactgtagcgttctgtgtatttgtagcagctttaacttcaggcttgctttcagcttttgtagtatttttctttttagctttacttggcgttttctcggcctctatctttttttgttcaactgtttttttatcatgtaacttatatacaactcctactaataattcacagcacaaaataagccccatagctcctatgagcagtttcatcttattagattttattttagctcttttagtgaatttattcctaccatttaatatactaaattttttcatctcaatcccccgcttatttatatatcactataaataacatattttcacttacattttacaatttatctctcaggattgcaaatttgaacctttatcttatttgtttaacatttgtcatataattaagttacagtaacctcataacattttctttatttatatagtattttatttagatatttttattttttataaaaaattatttttttactttggaacatcttgctattgtaaaatatcctatataaaaatccttagatatttttataaattcctcctctgagcctaaaaacaccaatgatgcagctaaaatgtttttatcctgctctttaagaaatcttccctgtgaatcaacagctccaataacctttaatcctttagcctcaacttcatcctctgctttttcattaacaacacttgtatgaactatatcaacaatatccccctcccttaatgtccctataaaggtatcattgttaaatttacttaagggtattgaaatttctttttcgttttcttttaaaaaaggttttaaatcgtcatttttatctaaaactctttttttacttatcacttctcccttataaatattctctgatgcatatttattgcccatgtactccatattagtaacactgtcagaatttacacattctctataatattcaactttttttaatgaagatttatcaattgctgttccttgttttatatcttttgacgctattattacatcttttttacccgaagaattaattattttgttttcagccataattagacagccaaaagcagcacagctcatcaaaactgtacttatcaaaatttttatattagattttctaaaattcaaacatatcatcctttctcaattaactacatctgtatcaacagaggtcataaccctctttttttgtccaaacaaaagtcttacatcataacttatagctgcatgcacacttgtattttttaccactacattatctgtggtcttgactacattaatacttcgattttttatttctctcctcgtaaattcattattttctctactatacgttagtatttctacataattattctccacattatatattgtaaattcatctatcgtaacattcccttctatgaattgtccatttaaagaattaaaattattatcaagcctcatatttttctgtaagtgatctttaaaagttttaaaagcagcattataatcgcttatttttaaacatccttccttaaaacttaatgcctccatatccacatccttataaactgcaagattggaaagaataacatcgtcctgcactccctctgcttccttcataataagcttgtgaaaaaaaacaaattctaaacataaccccattaaaataactgtaaataaacttagaactgctattgaagcatcccctttaagcttacttatctgcatattaccacctcttttcaaggtctaatcacatttttactggtagaacttttttcgattactacagtttttttctcattagagaatactggcattattccacttgaaactgttactttttttacattttccttatatgacaccttaagatatacatcgcttccatagtccacaggattaagcgttgtgcctgaaatgtctatatcttctattcctatagatgaaaattccttcttcatgatttgagcattatcctcttttaaatatccatcctgctctattttaaacatatattttctagctatagtctcagctttatatgaattgtttataggtatcatatttgatataaaataaataaatacgctgctcattattaaaactcctaatagagtagctacaactatttgaactccacctgcttttcttttatttattactgaatccaacttatcacccctattctaagaaaatatactcttagttgctgttgtaaaccatgtttgtacacttgacataaatccatttatcagtgttttgtacattgggtacgttataattaaaaatacagcaataataaccaaaactgcaacagtattcacctctcctctctttactttaaaattttctcttttactttccttagatatttttttcataatactcatcctctccataattttcaaaataaaaaaagctacaattttcttaatactacattaactaaatatcccatgagcactttgcataagatcacttcctatacagtagtaaattgtgcatattattcctcctaaaagcagcattgatataattaaaacatgtatatctattttttctgtctcacttgcagtataaaatgaatttatagtttttaaagcagaactctgatcgtctaatgcctcttctgatacaccacttgttatgctttcctttataaccgctacaaaagcatctatttcatgcatatcatattcctgattaaattcatctagagccttttctatgtttttggataaatttatttttgcagctaatctaataagacttttttttaatcttttgctcttacacaccgtattaacctccagcaatgcatgtccaatacttactcctgcaatagtttgaatagttattaaatcatatacatcagctaaatccaatcttattttgtttttatcatccttgttgctcaagtaatttaaaatatctactaaaaaaaatcctaaaatagaggctgttataccaaataaacaacctataaaagataaaccaatatactgtaacgaagcaattgcagcaatagtggaagttacaaattttacaaaaatataagttttaaaatttaatttaaaaggattgccacttttaataagtttatcttctattaacttccggttaaaaagctttattaagttatatgtcttatgttttattacaaggttagatcccttggcttttttatatcttgagttaaatttaaattttataaaataccttatataataagcggcaataaaactgcatattaaaaacattgtgtttaaaacatatatcaccaaaaaacctcctttaatagttaaactttttaagtgaaagacatctatatattgagaataaaatcacacacaaaagataccctactaatacttgtccagttgttgtattcataagcaaagcataaaagttatctgtaactttagaaagcgcattaagtattataagtgttgcaaatgctatagctgtaatacttatctgtgcacttttcaccttacttttcctcttttctttttcttcataatagtttctaataaccactcttgttttatcaagaagcttacaataatcagcattatttaaagaacatatatataaatttttaagtatatttcttagtcttatgttttctactttatttatataattttcgaaagcctttttcataggcatccctacccttatatctcttacaaaatcattattataggttcttaaaggctctttaagcttttcagtagtttcctccatcataaaaactatattattttttacagctgcattactctttaaggaacttattaaaaacattatactattatctatcctatcaaaattaacctgaaccatttcctttaaaacaccatataaaataataggtaacgctgcaaatgctactactgaaaatatcacgctttcatatatcttgaaaacggcaactgaaaatagaaaagacataataataacccccaaaataaatatttcagaggtcatgtattttaagtattttcttatacctgaagagtatattgtttcatctaatttacttaaaaaaatattgctaccttttcttttatatatcctatttacttttttatcaaatagcctatctctatactttttgtcaaaatagcatagtatagatttcactttctttttatcatcatttattaatctctttgataatatatatgatatgcacagcagtgataatattaagatcagatttataatctttaaaagcttcaaatctcatcccctccaaaattcacaaaattagcgtactctatcttttcttttactttattacagctatcatttaattttttgaaattacccttatagaatttaaaaattggattaaatacaatttcgcatctctgctcatcaaagttcgatacctctgttatctccataaccttataatctttcataaatattattatatcgattgcagaaagcaattttaaaagagaaactctacttaaatttggatttgcttcttgcatatagtcaattagtttatttacagcctcctttgaaccatttgaatgaactgagccccatccatcatgtccggtaccaacaaccttaaaaagatttagagcctcctttcctttaatttctcctattactatcatatctaaatcctctgtcatagcaaaccttgttaaatcccctaaggaatattctgcatcgttttctcctgtcttaattttttccttttgaaacatcatattaggatgatctgaaaatagctcctcagactcctgtataataagtgctgccctatcatatggcaccttttccagcagtgcatttatcatagttgtttttccacttcccccctttccgcataaaagtatatttactcctgcttttactcttttaacaagataactgtatatatctctgttaaacatattatgctttagcatcaaagattcaagttcaacttttcttttaggtattttccttatagaaatataggaattatcaacggaatttacaaaggatgaacttaagcttattcttaaataaaatttgtctgtcctatctgacaaaacttgaattgcattctttttatcaagagttccattaagttttatcacaatgtaattaaaaaatatatcaagcgattttttagatggaaatcttatagtggatgggagtcttttgccttttatttttatttgtatattatcatatgaaagtactcttatatcagaaatttcatcatcatcaattaggtcctgaagaacgtaatatccaaacaaatagtctttaaccttttttatgagaattcttttaaccccattatcaatttgaatctcatttttatctacataatttagaatttcatttttaagagacttatctggtaatttaccactttccgtatcatttattaggtagggccttttgtctgtaaactccattactatactatcaactagatttattagcttttgttctatattatatgatgtgtcttgcatctgcaatgaaatgttacttttgttgttagtctcttcaactaaattaattctgttcaattaaagcccctcctcttcctttataaaaagtctactaaaaattgagggcttggggatatactccaatttttcaagtaaagctacatactcttttaaggtatcctttcctctcattaaggtatctataaaaggcttttgtttatttaaagcctcttcccttctatcatccttttttaggtaccctattatgttataaccttcaaaaagcttttcaatagtctcactatctaaacttctacttgaaatttcagaaataacaaactttagcttatctttacttattatattttttaaattatctactaaaagaagggtatttcttatgctcgtataatttggccttgtaataaatataactttacttgatagccttataggtataaatgtactgacaagacttatatcaggattggtatttataagtatagtatcatacacctttgctgctgtattaactatttcttcatagtaacttttgggtatcttttctgcaagaattaagtcatataaccctgttgctatttctatatttctatatttaggatgcctttttacgaatttagttatattgttttcattaagcatatttctctctattgcattatgcatcaatacaaggcttgtacttttttttaaatcatacacactttcaatctctatttcttttgttactccaagaaaatcgtccataacaggaaataatgtattaaaatctaaaatcaatattttttgctgaactttttttgataaaatcacacttagttgagttataaaatctgctgttaataatgaatcttctgctgtatacaccgttattatatttttctttagtatcttgggtttatagactatttcctttacaggaatctcaacttttttttcaacaaccttaatctttttatctactgtacttatcttttcattgtacattgaatttggtatgcctttatatctaaggtatatatcttttatatctgaaaaagaattaggctttaaaatcaatttaataatatcattaggctttacagggtcaaaaagtatatcatttacggaataactaaaacatctttttacaccttttacatcatcgcaattagtaagatatataatcctagtattatttgattttaaaataaaaaaaagatcctgaatttttgtatctcccataagtctgtctgataaaactacaacatcaaaggtttcaatcttaaaaaactctctataatttaccatagatatttttgtgtcctttctattttcaagaatctcttcaacctctttatcgagttctatcatacccgttgccattgctattttcatatcttaacttacctcctttatattaaaaaagcctggaaatatccagacttttaaacttaactttacacaaataaattttttgacaacaaccgttttatataacttttccagaacaattaaattttaatacatattttattatatatactatcctatttctactctctttctacctattttatttctcactttttctaattttatactattttaacaaaatataatgaattattagctcttatatattataatataatggtccgtaaaatatttaatataataatgactaaggaagtggcatatataatgaactttgttactaaaataactaaaaatcatattatcaatacaataattatagctattgctgcaataatattattagttagtctttccataaatccaattataggaaaacacgataatggtgattttggaaggctaatgatatacggcggtattgataacctatctaacgcttacaaagatatttatgatggctttcttcacattaaatattcaacaaaccctttgaatgttcttttattattctataatgactggacttcatgttctatacctgtaaaaatatcagttattctttttcttatacttcataagtttactggaaatttatttgatataaggtatttatcctttgtttacagcatactatttttgatgggactatatttgataataaatttcaaaaaattatctacttctttaaagataatttgtggttcatacatgattttatttttcacaagtacctgctatgttgaatattttaattctttttttgaagaagcaggaactatagtgtttttcctcttatgcataggtacttatttaaatttaatagaaaaatcaaagcctcaaaaaagagattttgtatacttttttgtagcatcagcattttttctcacggctaaagctcaaaatctgccgatggtaccatttatgcttataatctacttaagcctatacctagtatacaataagaaaaaattaatacttataagctcaatatttgtgatttttctttgtataatttcatatttttctctcacaaaggtcatgaatgaaaacaatatatatcaatcagttttttccggagttttaagagattcaaaaacacctactaaggatttaacagaattagggctagataagaaacttgtggtattcaaaggacattctttttataataagaataatggactggatcctttaagcaataatatgcttaaaaatttttatcccaacatttccaattggaaaatactctttttttatctaaaacatcaggacagaatgtggcaaaaaattgttgatgcttccaactcaaattataggcttgataaaccctatagtggaaactttgttaaaggacagtactccaagaataaacacttaaacacttttagaagctatttaattagcaaatttccttatatacatcataatgtttacttatttattattttctcgcttatatactttactacatctgttatttacgcaataaaaagtaaagatgtttcaataaagctcctgaatttaatgttaatttttattttaataacaggttcttcccaatttatacttcccgtaataggtgcggggcatggagatttttcaaagcatctttttttactcaatttttcttacgatattatgtttggagtagctttactatggttttcacacattatttcaaacatttttttatttcataaacacaataactactttacaaataagtaaaatttatgtgtttattatccaaacaattgtgttataatataaataaagaaagccattgggctttatgcttaagtacaagattttctctaaaaacgcacttagtggaatgggtgcgtttttagttttttgagtttttattttcggatttaatttctatttcagaatccaaaacatctttaattctcgttctattttttaatgtcaatttatctttcatatacgtagcaataaagaccattgcggtcattgccaacgttgttacgcaaactattgcaacaagaattattttatcactcatagcatcaccccctgttgtcaagattacccaacaactttcttctggccaggaaaaacttactggggcgatacaaaacatcttatactgtttttccatatccatattataccacattttacataatgatattcattataccctatttataagaaaatttttcgcattaaaatgtaggcttctaagtctattacttagaaacctaaaataatttgatatttataaatcaagaaaagccaataaaaagtcctaatcttatttcttaaaaaacaaaaatataataccaaaaatcaaaagacaaatatagccaaactttcttttaagatttttttctttaaatataattcctccaactacagcagaaacaattatagatatttttctaagaggcataactattgaaatctgacttgaaggtatattaagtgcagtaaaatatatcctatctgatacaataagtattaaactcataaaaggcacataaaaatcaatcttaattttggatttatcctttgaactaaccctaaaataaagcatggtcagtccattaaacaaaaacataaagaaacaaaaccaaaattgcatttgacctgcatttatagatttaagtgctattttatcaatagttgcacttacggcatttaatactgctgcacttatcataaaataaaaatacttattcttaaatatatttataacttcacttgagcctactcttccaataaaatagtaagaaatcagcataattccaataccaatatactgaagcaaatataacttttcatttaatataaatataccaaatattacagaaaacattggatttaatgtatcaaatggagttattacacttataggcaatttcttaattgctgaaaaactaagagcccaagatataaatacgataaaggtttttatcaatattattaatagcttatctccctttatattaattgcattatgaaattcaaaggacaccaatagaaaagcaaaaaaagaataaaaagctagtaccgttaatactgaatttttttcaaaagcttttttctttgttatgtcccaaaatcccaataaaatccctgataaaatgaccatccatatccatgaatacataaaacttctcctttattatataatagtcttttcctatgtttaaataatttcctcatatagtatatatttttatttaatttgggtcaatttttatgataatctaaaagttaaactccatcttgtatataactcccattcccattttgtaatttatatttgtcaaatgaaaaaagcaagcttaaatctattaaacttgctttatcaaaacattctatttaattttcagggcatctataattttattctcctgatcttgtgtaattaccttttcctttactaatttatcaagtgcggccttcggtgtattacctgtagctttattcacagtacccataagtgcatttaatactgaagctgattgttcctttgttattgtgctatccttctctagcttcttaagatcagcatcgtaggttttcttaatttcatctttattagtaactttttttactgaattttgattgtttgaagtagaattattactgctgcatccagagaatgcaaacagtggaataaataaagctagaataatagtaacaaatttattaattattttatactttttcatttaaagtcttcctttctacaaattttatactattatcctctactttttatacaaaaaatatacttgtgtaaatacttttagtaataaattttattattaaaacatatttttactttgttaatttatgcatatagttattagctccctctgttattttatccgttatgctaaatttctttccagcctcatgtcctctaaggtaaatatcgttatgcccattatatttagcgcttactttaagtcttccattaaattttatttttttatgagcctctaccacttctttatcttttaataaaacaagtccccactcagtattagctctcttttgttcttcaaatttttctaaaagcccttttatgaatccaagggcataatcattttcaatgcctttagtactgtatccttgttttgaatatttatattttaatcttttaactatactatttatactgtctattgcatagtttaaaactatattgcatacaacgatatcctcttcctttccaagaaatgctataatattggttctttttcttttgtagtagtgataacatccaaaattatccgctataatctttgcaaggtatgccttccatctagctttagtaaatgatatgttactaaccttttcctttacttcttcattataaatttcatgctcttttacttccttcattgacagtttgtattttaaaagaagctcttgaaccttaagcatggcaatctttgcttcattttcattgctgctctcacttaagctaagaagcttttgtattttctcgattattttagtatccatgttgttcctcctataagaaaaggcagctgcttaaaatatttttagaagcaactacctttataatcttaacttaagtcaatctactattcctacgccgtaaaattcacccattgttaattatcttcttaattcgtattcttaactaatcactattctaccatacttttcatcatttaggttatatgcttaattaacctgaatcttctatctctcataataagaaaaatcaaaggcaatataatattattcacttttctcaatatttccattcaagggattaatagaatatcttctagcataggctacttgaactcgctaatactaaaattcatccacgaaatcccacagttcaagtaaaagttaatatattacatcgttgctttgaatttggaaaaagtataaaatcagtatcagaatatattgtttatactaggcctagcatttatacttggataaaaaaatatcttttgaaaggtacaattgcattgattaataataaaaatatccaaccacaaacattagaagaaggttcagctcaatccaacactaaaattgaagaattagaagctcaaataatttatatgtagcttgaaataaatattttaaaggaaacaataaatgtattaaaaaagactcaggcatctaccaaacagctcacaaaaatcgagagaaggtagtgatattctatgccctaaagaataagtattcactgccagtattgcttaataaactaacccttgcaacaaattgttaaaactatataacctcatgttctattcttaactatacacatatgttttaaaatatttattactaatcaactggtgcctttcccttaattattcgttctgcttcctctttagtaagattataatttaaaaattctttgtaaaatttaatagtttcgttagtaatgtctaaatcagaaaatttattaggatatagtgtttttgcagcccattgtatttgcagtgcttcctcagcaccatatctatcccacataaaagctccattaggattatgaattattttattatttttaacagcatttatattcttccatgcactagaattaaaaaacgcaccttcatctttaacatcagcgcccagtattataacatcaggattccattttaatatttgctccatagaaacctctttcatatttccttttacttctgatgctacattaattccaccagcaaccttaatccaagaatcaataatagtattagatccatctactgttaacggtgcgatgttttgtatatgtaaaactttcaatttctgattctccggtatttgtaaagtaacctttgatacggtatttatcttattatctaaatatttattgtatttatctgcttttttctctgacttacttccaagaatttttccagtaagtttgaaacaactttttaattcatcaaaattagtgaaattcaattttactacactgataccaactttttttattttattatcaaaattataactagtaggtaaaaagacaatatctggttttgttttaataagtgactccatattcacatctgtttttgtaaaaacagtttcagactcattcatctgcgggtttactttatataaccatggctcctgtttgcgagtaagtatagttgaaacaacattatttccatatccaagcatgcataacacttcattatgtgcaggccaaccatcacctattcttttactattttttggtacttgcgttttttctcctgacatatctgttactgtcatcttagttgattctttcttctctattgctctattagaattagaacatcctgaaaatactgtagtaaccatagctatcgtcattgcaattactgttgttttttttattatttttatcacttttaatcaccctcccttatattacttaataatggtatacatgatttaattacattaccatattgatcttttacacttataatttttacatctatgccgtacatagatttaagattttcttctgttataacttcatccattgagcctattttaaatattctccctctttcaattaatgctactttggctgaacacaaaaaagcatgatcaggaaaatgcgaagtcattattatcccaattcctctagcagctagtttattaatttgctctagcacctttacctgatttccaaaatcaagattagatgtaggctcatctaatatcattatctgtgattgttgtgccaatgctctagctattaacaccatttgtctttctccaccactaatttctgtataagttttttcttttagataccctatacctaatacatcaattgattcactagcaatttgcctatccttttgagatggtgttaaaaaagcacccatatgaactgttctacccattaatactacatcataaactgtatatggaaatggtagagtatgtgcttggggaacataacttatagctttagataattgcttttgtgatagtttttttaaatcttgtccatctagtaatatctctccgtcctgtatttttaaaaaaccgagtatagttttaaacaaagtggtttttcccactccgttaggtccaagaatacataatatttctcctgatcttacatgcattgttatattgtctattatgattttattattatagccacatgctaaatttttcaatttcaaattcatacaagatttttcctccttattattaagtaaataaatagaggagctcctattagcgatgttataattcctaaaggtatttctgttacaaatatgttccttgcaatatcgtctactattaaaaggaatgtactgcctataatgagacatgtgggtaacaaatgtttatgattaggccccgcaatcattctagaaatgtgaggaataattagtccaatccaaccaattataccgctaaacgaaaccgctactgctgtcaaaattgtagaacaaattataacaactgctcttgttctatgcacatttattcccagtgcacttgcttcttcatctccaaacgaaagaacatttaatctccaacgtaacaacataagaagaattatcggaattaatataacgataagcataatttttatatcatctaaactaatagtagttaacccacctaataaccaaaatgttattgctggaagcttgttatctgcatcggctgaatattttaccaaagaaataaatgctgaaaaaaaatttgaaactaccatacctaccaaaatcaataccgctgtagaactacttttataacctataaatttatttattatgtacgttaaagttaccgcaattatcccaaaaacaaatgaagaaagctgcacttctaaactattaaatgataataaaattgctattgctgaaccaaaagctgctcctgatgaagcacctaatatatcaggtgataccataggatttttaaatatcccctgataagctgctcctgatattgaaagtgcagctccaattaacatagctcctataattcttggaagccttacctcaaatagtatgctatctgcactagaaatacttccatcggaaatagaaaatatctttgaataaataatatgtaaaaattgtttaatggaaattgaatatctacctactgatattgaaataaggaatgtaatgattaatatacttaacaaaattagcattctaccaattttgattttttttttaccgggtataatattattgtcttcacatgacttttttatatagtccattaaaaatatcctccttccttagttaaattagtaatcttgctttaactatctacctataaataatttttattgtatccccggtttttatttttccttcttgtaatacttttgcaaatatgccttctttgggcatgatacaatcacccaatttttttcttatctcacatccaaagtgacattcctttccaacttgtgtaacttcaaaaactacatctccaatctcgattcttattccaattgggagcttgtacaagcatacaccttcagtagtaatattttcagcaaactttccagggcccaaacctatttccttatttcctaccttttctatactctcaactgcaagaaagcttacctgcctattccaatcgcctgcatgagcatctccatcaagcccatgatttattttaaaaaatccttcttctataggctgctttattgtcccctttttcttactaatatttacagacactactttagccatcataaaccaaccctttcaaaatctccagatttaccaccactttttttaactaacataatatcacttataaccatctctctatcaattgccttacacatatcataaatagtaagtgctgcagctgatactgctgtaagtgcttccatttcaattcctgtcttaccaactgtttttgtcattgcaactatttcaatttcactattttcaaaatcaaacttaaaattaatatcacaatttgatattaatatattgtgacacattggtattatttgggaagtacttttagcacccattattccacctacttgagctacagctaatacatcaccctttgaaatagttccctcttttattctttcaagtgtgtctttttccatggagatttttccactagctatggcttgtcttattgtattgtccttttcacttacatccaccattctagctcttccttcttcatttatgtgcgtaaatacttcgctcataatttcactcctatccaccaatttggtacatcatttttttgcttctgctaatattttcttcatttatatggtgctgaaaggtcttgttaaaaattatagtttttaatttctccacaagaacatcttcattatttaaataaggcttcaaatctatttcttgattagaatgcaaacatggttttatagtccccatagatgtaagtcttattttattacatgttgagcaaaatttacaacttataggtgttatgtatccaattcttccttttccaccttttatcttatacatattagcagtactattttgaagactttctataggaattaaatctgaacgagacataagtaattcctttatattcactctacctttttcataaatttttgctccttcacctataggcattagttcaataaaccttatttctacaggcatttctctagataaatttacaaaatcattaacttctaaatcgttaattccctttattaatacagtatttatttttacaggtttcaaattaagcttcaaacatgtatcaattccatctataactttagttatttgattaaagttagttatttttgtgaatgtatcacttttcaaagtatcaagacttatatttactcgttttaatcctgctttctttaaatcttttgccatctgtggaagtaaaataccatttgttgttatggcaatgtcattaatttgaggtaattttgaggtttcatatataattttacttatctcttcattaagtagtggctctcctcctgtataccttaccttatttattcctactgaaacagctgctctaagtaatttaaaaatatctgagcaactaatcttattgttttcctgtatgtaacctttcattttaggcatacaataaatgcaccttaaattacatctgtctgttactgaaattcttaaatagtcaatatttctgccatgcttatctatcataattttctcccaccaattacttttatatgttatagtaaaagttatctcataaaatcaatgtccaagtccattatttatatgtataatatgttccattgtttttaataatatttccatgtactcaataactgcttttttacttcctggaattgtataaattaaagtgctgccattaatacctgctattgaacgacttaacaatgcatgtggattctcttctccaaattttactcttatatactccattaaacctggtatcttcttttcacaaaaagcattaacaacctcataagttatatctcttgcactaactcctgtacccccaatcgtaaaaataccatcgtatccttctttaatgtcattttgtatctcattttttagttgttctccactttgaggaatagacttataatcaatatgtagtttatatgtagttgcacaaaaatgcatatttaatatttccttcattttctgagcactaacgtctgcatttctactataaaacacatcatcatttatggaaattattttaaaattaaggattctagacatatgcctcaccttaaaccccagcttaattacatctgaagactccagctctactacaacttcattacatttatcttctatccttgtaatattcatttcagtttttccaataataagcttatccaataaattaatattatttttatctattccaactataaataaactttcaaaaaaaacttctacttcaaaaggcttttttttatctggttaattaccttaagagttttataatctttatttctctcaggcataaaattgtctattgctaaaacagttccctcatatgctgtattatcattatatttaagcattatgaatcttctcctctttaaaatctttaaattataaaacttccgattagctttctctgattttcacttctatgttatttactcttctaaatacatctactttttttactatttcgctaatgttattttcaaaatcatactttacaatataatcagcataatcaattacttctcttgctgattttttaatagcactcacaccttctctattaaccattataaacccaccaggtctaaccacatgacgaatgctatttgattcacatattactaaggtattctttggcaattgcgtaataaaatattttatagcttcatagctataacttttcaaggttttaagccaaaacaccctatccgcacctgcttttaataaacatgccgtatccttatttgtgttagaattcacttcttcaagtaattgaaaattgccttttaaactagagcaaacaccacagccttctcctcctctagggcatttaccatttttctctcttatggttgtaacctttaaccctataacacaaaaattatctttaaatttttttattattgcagtagcaagagtagttttccccatattacgtcctgttgcaccgattaacagcatttgtggaatttctatgcactcatttttcattatttatcccctcataatatatcttttaagtactgattataaaaaatcttcaatcacttttgtaaataatttttttgcatcataccggcgtatctcttctttaatcttagaaaacttattagcgtactgaaaactatttaacattttcataatttcatttgcaataaaatcacttttagccatattaggtcttattgctttccctagcccctttttttcaaccatattcattgcaagacattgatccatattagttggaaatccaattaatggtttaccctttgaaagagcttgatatatacttccagaaccaccattgcatataactatatctgatttttctattgctaacaatgcaggtatataatcactaacaaaaaacttttcagaaaggatctcattagaaattctattagcagttgccatgataactgttacatcaagtttatttaaggcatttactatttcccccaataatgccaagtttcctgtcgaacccagtgaaaaataaataataggtttcttaatactatctattttattccaccacgtgggaagctcattatcaacaaactcagttataggtccaatatacatatgttcctttgataatggccttgttggagcaagagaaggtacatctaaatataagttcaaatctccattacaatgcatctcttccattgaatttacaggatgcaatccagcattaaccctaagctcattaaaacccttaatatatctttttgttactagaggtaacattattttaaatagtctttccttattttttaagcttaccttacttaaaagtggtatttctggagtttgccttttttgtgtagaaaagggactccaataagcattggcaatattaatatatggtatattagcctgccttaaagaaatacctaatgaaactctcatatctccaacgaccaaatctggtttaaatgtagaaaataccttctcttcacaatctatatacttaataagagttttcttatcaaataccttaaatggcttttctatccgtgaattaaattcttctggtgataagctaaaaatttcaaaataattatcaattttatggcaaacaaattttttgtaccttttactacaagcaaaagcaatatcatatttatctttgtctatacacgaagctaaatacattggtcttacaatatgtgataatgctattccctcaccaacaaataaaactttctttttcatagaacttccactccatttacaaaattatattctaattattaattctgtatcataccatcttttaagaaaatcgttctattaccatacgttgaagattcttgtgaatgagtcacctgaactattgtcttgcccttttccctattaattttacgtaaaagttccatgatttcatttcctgttttcgaatctaaatttccaataggctcatctgctaagataatatcaggttcattgattaaagctctcgcaatggctactctttgctgctgaccacctgataattgtttaggagtatacttccttttcgttgataatcctatatcctcaagaatctcatctagtttttccttatacagtttttcacttttaccttctaataatattggcaataatatattttcttcaacactcaaattaggaatcagattataaaattggaacacaaatccaacattcctacatctcatattactcgcttcattatcactcattactgctatatctttccccttaatttttatacttccggaagttggcttatcaagtcctccgattaaataaagaagcgtactttttccagaacctgatggtcccattatggaaacaaattcaccttcattaattgttacttgtatatttttcaaaatagtagtttcaattttatcattcttaaatgttttatatagattcgtcacctcaatagccgttttcattttataacttcacctcaaattccataatattaaaagcacccaatctgacaattcttaatttttatactattcttattacataaagtaccaatagtagatacacttatattgaattctttagcaattttaaaagcaattgcacactgaagttgcttttttccattaaccatcaagcaatgcttgttaatggaatccataatctgattttcatccataaaaataccaccttctatttataaattttccattctcccttcttcaaatgctttcatatttatatctaaaaatctttgtggaacagtttcttttattgactgtatccataattccttttcaatatccataacccttgaaaatgcccccaaaataaccatattggaaatcttcatatttttgtactttttacatattttaaggcaatctaatgatattgtattcttgcatacactcttaatactatcaattatattatctgggtatttctctttgcctataattactggaaggggatatatcttctctgtatttacaataactattcccttttcatttaaatattcaatccatctaagtgcttcaagttcctcaaaagctaatattatatctgcctgtcctttttccactattggtgaatgaagtttttcaccaaatctaacataagttacaacacttccacctctttgactcattccatgaacttcagacaccttaacatcataattctttttcataccaactctaccaaggattttactggctaacaatgcaccttgcccaccaacaccgactattattatgttaatattcctcattcacatcaccatcttcctcgaaagcatccattttacaaatattcatacacaatttacacccaatacacaatgatttattaactacaatatcttcatcttcaatacaaatacaaggacatcctatttcaagacattttctacacttaacacatttactttgattaacttttaaaggaatagcctttgatttatgttcttttattcgttcgcactctcttcttgcaataataacagaaggctcacatgctgcaatttcttcctttacaacactttcaacttcatcaacattaaatggatctactacttttatacgctccactccaactgctctgcaaagtttttcaagttctactttttttgttgcttcatttttaatattataacccgttgtaggattagattgatatcccgtcatagcagtaactgcattatcaagtataatgacagttgaatttcccttattatatacaatatcaattaatcctgttataccggaatgtataaaagtagaatctcctaaaatggcaacagttctatttataaattcagtaccacgtgctttttccataccatgtgcaattccaatactagctcccatacatatgcatgaatcaatagatcttaatggcaataatgcacctaatgaatagcatcctatatctccacttacatttaattttaactttttcaaaacataaaaaattcctctatgaggacatcctggacacatagcaggaggtcgtgcaataatatctttagctatttttttattaacagtaggttttttactagaaaaactattatttataatctccgaatttaattccccaaccataggcaaaacttccttacctattactttaattcctaattcctttatgtattcttcaataaaaggttccagctcttcaataacatatagttcttctactttatttgcaaacctttcaattatctctcgtggtaaaggataaaccatgccaatttttagatatgacacatctttaaatacttctcttgcatattgataagcaataccacttgaaattattcctatatttctttttccccactcgatattatttaactgtgatgattcgctaaaacttactaatttattcattctactttcgactttaatatgtcgtacttttgctattgcaggaaccattacatatttattaatatcttttatgtaatccttaatatcacatttacatctttcattaatttcaacaatatcttgagaatgagcaattcgtgtggataaacgtataattactgggcaatcaaacctttcgcttatttcatatgcctcttttacaaattctttacattcttggctacttgatggctccagcattggtattttagcagcctttgcatatcgtctactatcttgttcattttgggaactatgcattcctgggtcatctgccacaacaataactagtccaccattaatacctgtatatgatactgtaaataatggatcagcagctacatttaagccgacatgtttcatagagcacaaagctcttgctcccccaattgaactcccaattgccacttccaaggcaactttttcattgggtgaccattctgcatatacttcatggtattttgcaatactttccgtaatttctgtacttggagttccaggatacgctgttgctacagtaacccctgcttcataagctcctctagcaatagcctcattaccaagcattaatttcttcataatactatcacctcgaatttactaatattattgtattttaattactttcttgtccaaatatttaagaactgtagtaccaagtgaatctataatttttttcctgataggaggtattttaagaaaaatagacataataaagtttctaattctattttcataattatactgtggaaaatcataatacttattttttttataatacctatgatctgcactaaatatcattctatactctccccaaatcatatctctaaatactttatgacccccaacacctaaaaatgttctttccttaacatagtttaaagtagaacatttaactaaattttttgagaactccaaaatatttttatctatttcagctgatgttgaaatctcatctgtaactatttccaccaaattacatctttcaaattctgcaagtgtttgaatactatcagttaaatcttgcacttgtctcaattcaccagaaactaaatatcccaattgtttttttgcaaaatttggctgatgatttttgtaaaatcttctatctataaacagcttccatcgtgcagataaatatctattttcaatttcccctgcaaaaactataatgtcatagcttctaattttttcgtataccatgccaatatcatctttaccactataaatgcagctgccatcatatacacaatgcatacacccaacacatccgccatttatttttatgtcagatatattaatcaaatctgcattagtaatacttacaaacttacttaccatttttccaatatttttatttaaattcatagaatcagttacaacaacaattttcttacctttattatcaattttgaattcattatattctggattatattccttaactgtttttattattggattatatctacgtggatggtacttttgattttcaatatcgtcaaaaactattttgccaaaagaataaaaattgtttttcttttcttcattggtcaaatcaaatatctcagctgaataataatctacatatctcatatttaaatcatcaattatagcatgcacatattttattgctgctatatcaaaatagtgtactgatgttgtaattattaccgcatatttatccctaaacacttcagccatattattttcaaaaatcaattcaataaaccttttatatcctgctggtactaaacctagatatacaggaaatccccaaataacaacatccgcctctttaattttatcaattatcttatgcctctccttctcatcattttctaacctccttatattacgtgttatgtttatataggtaaaactatgttttgcaaaacttttttcaagaaattctacatatttcatagttacagtattacacgcttctttgggacttccatttaaaactgttaccttcatataaatttcactcctagtttatatattttataagtattcttacaaaataccacctctaaagcataaacaaataacttttataattattcactttttatctcttgaactatattcatttttaatacatttctagccgaaccaatagaagctaacatagaaatcaaaacagcaccaattacatatataataaaatctttgggaaaataacttataggcattgctaccttagctatttctagaaacataggaattatatttattaaaataatgcctactaatacacctactgcacctgatgttaaacctataattaatgcttctacaaaaatcattttcataacttgttttttcttcataccaatagatctgtaaacagctatactatgttttctttctataaaacttataacaaaattatttattattccaaaacagcctactatgatagatattatagaaaagccctcaatcatcatacttaactgctgcatagaatttttaaaattttccttaaatgtgcttgtaacctctatgtttgggtaataatctttataagtcttctttaatttatcatttacctttgagacttttacattgtctcttacatgaatgtaagcagctacataattataatcccctgtatccttttgcaaatatctgactgatatcatagcaaaacttccttgtgtcatataagtatctgcaaaaccaattacagtataatttcgtttcttaccatttaactctaaagacaacttactattcatgcttaagtcatatcttttttgtagtattttacttactattatatttcttcctgactttaattttttgagcaatgcttccttatttcctactaaatttatttttctgtaattaaagtacttatctcccgaaacaccatctattagactaattgaatcctttgagttttttactttaacattttgcacacagttcaagcctaatacatctttaacatttgaatctttttttatagtttcaacatcgcttttatttaaattggggaatgatattccaatatcataagtttgtatattagctattgaatctatgagctgtaccgtcatatttttacataatgtattaaccataagcagtacaccaacaccaatgacaattaaagttgtgatatttaaaatgcttttattatttctcatatttccaatagaaattttgcctatacttccaaacaataaagagaaaggcgtttttagaacttttattaatgctttaaatagtaacggaaaagcatataatatacctacaaatatgcatacaacggaaattaatgatcctatttccacaaacttaacaggaacaaacttaggtaaaatagctgaaatgattaccaaaactattccaataattccttttttgttactactctccttatgttctgatatattatttaatacaacctctttaattggtatatttgaaacattcattataggaataatactacttataaaactaataacattagctagaataaagctaattaaaagattcatatatgatatattaactttaaccattccttgcaattcactggatgtggaaaacaaagtaagagcatacgttattcctataccaacaacccctgcaagtactcctccaattattccaaacaccatactttccataagcataaccttattaacactttttttagttgctccaacacttctaaaggtaccaatatggggcagcttatttatcataataatcttgaaggatgaataaattataaatatactcataaaactagcaattatagttataaatattaaagatattgtaatggttgatagattttcatttaattgttcttgtgtaaaaggctccttcacttcatacttaggataaatactttttagctttgatattagcttttccttactttctcttccatttgatttaatatacaattcattagccttaccatctgtcttaaaataattacttagactatcaaatggaataattgcatatctctgtatagattcatctaaaaatatcccctcttgtgctgcaataccaacaatttcaaatttataagttgtaccattaattttaatattcatggtgctaccggactttaggttataagccttagcagtagtactactaataataattttatttcctttaaaaggcttaacatttttctgactgactaaaaggaaatcattcattttcttatagtcacttaaatttataccttttaaacttaatgtatcgtattttttagaatttatttcataactgcatactccattaacttcgtgtattgcatatgaaagtttttcattcaatttatctgctaatttataatctatatattttgaactagaactatctttagtttgaactgttatatctgcatttcctacttgctgccttatcctttttgtatatatgtctgataagctatttttaactgacaaagaagaataaaatagtgataccgatactgctatagcaaatataaccagtaatgatcttaattttttttcccacattgacttaaatacatatttaataagtattctcattattgttaccctccctttttacatatagaaatttgatcatgtagttttatacaccacatttatagaataatttcatctagtattttcttaaaatcatactttaccctcctagttagtccatctttgtcattatacctaataaaatttattgttattttatttttgtaacctgtaatacacattaatggaaacccttcagcaaaaccacatggaattacaaatgcatcttccataaattttttatatggctcgagatacttatccattttgccaatattagttgatgtcattcccaaatataactcatctacaacttcaccttttctctttagtacttcttttctcataatttcagtaggtaatattaaaaataaataaaacttgtaaaaagcactcaaccccataggatatctttttatcctcttcagtttctcattaactttttcaatatcttcaacatctgcatcttttatccatacatactgtaaaaacgagtaattcccaataaattttttattagttctaatatattttctaatatctattctcattccagtttcaatatatttattgcttttttctaatgccgaattatattttttattaaatttcaaaagtaaatgaagtactatatcatttatagtgaatccatatcctttatagtaggcttttaacttttttacttcagtctcacctaaatttattttttctacactcatggtattacagtcaacatttacagttttaattttttcctttttaattaatggatccatctcactaattcgattagtttcaaataaatttttaatagttccgcggagcatatttatattatcttttatgcttatgtgaaaaataggcttagttatttttgaaaccagcgcaggctgattatttaattttttttctaatattagattgtagcattgtccaattaaacatattatctccagccaccctcttacgtctgctaccgaatgatgcattccaatggtaatcattttatttttactttggctgttataaaataccgttattttaataggagactcattttttatgtctatgtgtttatcctttaatttaataaactcagaaaaagccaattcattaaaagcttccttatcagccacttcactttgaatatgtattttcttaaatatttgacttacattaaactctttaatttgttgccatttatctctccaatagccttctgaaaacttgcatgatagtataggtaccgcttttactacatacgtaactgcctttttataaatctcaatattaaaattatcatttaggtaaaatatataataaatggtacttcctagcatatttctgtctattgagcaaaaaaagctttcatgaattgtagctttataacatttattttccatcattcgttcccctttaaacaattgacttttatatttataatgattttttcactttttttaaatcttcatataaaattttctcaaaatcattttttactttttgggttaatttatttttgtcattatacctaataaaacttattgtaagtttattcttgtacccagatatgcacatcaaaggaaatgaatacgaaccaccgcaaggtataaaaaatatgtcatctataatttctccatatggctttacatattcatctatttttcctacattagtcgatgacatccctgcataggagtctattagaaacttttctgtcatctttgacaatagatgtctaatgaacctaactggaaatatacctaatatgtaatatgaataaaatacttttaatcctacacagctattcttaaaatctttaaagcagttatgtatttgtggtatattaaacaaatcatcactttttatgtatattgtcttaggaacagaataatttccaatgctaagcccctttgttttcaaatactttcttatatcaattctcacgtctgttttaatataagtgttgcatttttttaaattcaagccataattcatgttaaattttaaaatattatgaagaataatatcatttatagtaaatttatatacaccatataaagacttcaatttattaatttcatcaagatctattttaaatttttctaaactcatgcttccatatttatcatccccagcttgaatttcttctaattcaagtactggttccaatttaggtatggtattcctcttaagcagatttttagcagtataaaagataacttttaaaacattagcagtggttgtaaaaaattcatccttaaaactttttttactactctcacctttatctgcattcttcccatttaaaatactattataatatttacctgctaattctattatttgcagcatacctcttccatcagttacagtatgatgaagttcccaaactactactttactttctaactgcttagtgcaaaatacttttatcttaaatggagcttctttagttatatctatacaattattttttaattcaataaatttagaaaatgcagtttcataaaagctatttttatcatgggaaaaatcttcttccaaatatatttcttgaaatatttgttcaacatcaaagtcactaatatattcccacctatctctccaaaatcctaaggaaaatttacatgataaaatgggcaaatctctaactacatattttaaactttttttatacgcttcaatattaaagttgtggccaacatttattacataatatagagtattgcatagtatcttaccatccaatccaaacataaagctatcggacattttggccatcttatatttacgtttcataccttacacctcctttttaaaataaaattactccctaatcattttatcaatgctattgcaaaagcatattcatttttaagatatactttaactttaatatgacacttaaaactatccacatatatataatattcttgataccccaaacatggatttactctaacagaaaattgattaagttcaatggttatcccaactcccaaggctttacatattgcttccttttgaacccacatcttatacgcagcttgatttttatatatctcatcatacttattaaataattgaagctcttgatatgtaaatatctccttaggtaaagttcgaggctttaatactattttctctacatctactcctatctcatgagctttagatattccaattacaaggtactcctttgaatgagaaatattaaaatatattttttggttattattacaataaacataaggtttgttgtactcattgtaataatagcaaatttcccaatagttgatttcaagatattcacttataagaatgcgtgttattccctttcgcaagcaaaataattctctgatttttttattcttaattacattacttcttgtaatttcctcctgtgataaagtttttactatttgctgaaaatagcaacgaatttgattaacattaataacccaaacattgcatccttccaagtaagttactgcattaaaatacaacttttcttttatatcctctaacccatccattgtttttctccaatatctgccccctacactttacttcctacaaatatgctgtaataatcatctaatttaattattagtacatactttataacatttcttttattcatgcttttcctctaaattaaattttctaatcagttcttgaactacttttttatatcccatagacttaaaaaattcttctctgcagcattttaaaccatcttttatactagaatcttttattatctcaataacttctttccttaattgtttttcatttaactttttatatttgtaaacccttccacaatttctttcttcagccgcctttccattattatatctctctaatgtatcagtataaattaataatggtgtatcatatacaatggcatcactaatactattaaaccccccatgagatatgaacaatacagatttccttactacattcttatattcctctaaacccagcttctcatatatttttacgttatcatacccatttatttctttaactttattgtttttgtttccacctaaggatacaacaacattatatcctagccctgccaccgcattaatacaaatattccaaaagctatcactagaagaaactgtacccaaacttataaatattgtatctttttcaacatgattataactaatatcattattagcaggacctataaattttacattacaaccatatttattaccattagggtgaaactctttggatgttgtaacaattgtaaattcatgttgatcactcaaaatatctgatggcctgtcacatattttaccatacctcttatccattttaagttttatgctcatagcttttaataattgaggtatatgtaatagtatcgaaataatcaactgagttggtattttatcattcatattttcaagaaagaacgcactaaatattgctaatggaactttacaatggcgtgctgccattttaccccatataccaaaggtgtcacaaataaccaaatcaggcttgtttttttttatttcttcaagcataaatggcattaattcattactgcaaaaatataacatatatagcgctcctactaaatttttattcagtttgttagccttattaccaaaaacttcaaactcacttacaaattcttttggataactattaagttcaatattttccacttcattaaaatttttaaaatacttatcaaatgtatagtaaattattcctacattgttatctgataattccttacataatttaatggtcggatttaaatggccatctgccggaaaacttacaaacattacttttttcaacagatacatctccttataggttcttaataagaatatacttcattaaaaagtttttattatcaattataaaaactttaatatcttctatacactactgttgcgttgtgtccaccaaacccaaaagaattcgataatgctatgtggatatcctgtgctctagaatgattaggaacataatcaagatctaattctggatccgcatcctgataattaattgttggagtaataactccactacatatactcattactgttataattccttctataacccctgatgcagcgatggtatgtccaatcattgacttagatgatgatactggtacttcctttgctctttcaccaaaacacttctttattgcaaatgtctcatatttatcatttaaataagtagatgtaccatgtgcatttatgtaatctacttcataaggattaatattggcattattgagtgccatttgcatggtcttcaacataccctctccatcttttttaggtgcagttatatcgacagcttcactggttatagcatatcctgctagttcaccataaatcttagcatttctagcccttgcaatcttttcagcttctaataccattactccagcaccttcacccataacaaatccatctctagacaaactaaatggacgagaagctgtcgatggtgaatcatttctagtagacatagccattattttattaaatccatcgatatactcagcattaatatgagaatctactcctcctacaataacaacatctgcaagtcccgactttatcatctgctgtcctagtcctattgcatacgctgaagaagcgcaggcggttgatacgctaaaatttggcccttctaatccatatttaagtgatacccaggcactaggcgaatttggcattgattttaccaccatatgcatattcccagccttcttctctacctcatcatatccagtagatactatacccataatgacagctatacgagttttatcatagttctcaaaatttatattcgccgcactaactgcttcattaactgctaccattaacattcttgttgatcttgtcattctctttctatcttttttgggaatttggactttagctaactcttcaaactcatcacttactggtgccgctatatgtgtatctatgctctttgtatcaaatgaagttatcgttgttactccagatactcctttcaccaagttattccaagtatcttttaaattcaatccaacggatgtaatcatccccataccagtaattacagttttgttatagctttccattttatcatactcctacttaattactattttgtgtattatatacctatacaaataaaccatcatataagagcaagtaactctactgggtaataaagttcattttcctgtgctttgtaactacttacaaggcttgttttaacttcttctatgcctattctctttaacatggctattggattttctctcaacccaagtacttcctctatagcattacttattttttgcttctgaattccagtattatttatataaaatgccatttcatttataagaagactttgtaatctcaatatcacatttttcttatatttatctagttcatcttctttcaatttaaaaggtttttttaaatactttaattcatactctataattcccttattattacttccaccagcaaaaccttgttctaaagctttctttgcattgtagtgtaaaatattataaagtttttcataacgtggagaattaaaattttctatagcctttattataatattaatacctgttgcatctattatttcaaatccaccgaaggttaaaaaattctgttttacctctttttcaatctgttctatacttaaataattctctttgtatataacataaatttgaattactattgtagttaaaatcctagtcaatacaaaatttgatttttcatccagatcaagtgatgttttgccaatagtagttagaaattgaactatcgtttctacataccttgattctgtgcaccttaattcattaatctccacaaaatcaatgattttcactggaaagaagaaatgtaaccctaagcagcgttctttttttacacacttagcaaaaacaatctccaatggaatagatgacgtatttgttgccaatatgcactcatctttaacaatcttttcaacatctcctaaaatattttgtttaagaacttcatcttcataaattgcttcaattataatatcgcaatttttcaaatcctgtatattatctgtaaccttatatgcatccttctttgagttatactcctcctctgtaatcaaatttcttttaagcttttttcttagctgtttttcaattgaactttttacttcttccacctgctctgcttgtctacaaattaaaataactttataatcaaacattgaaatataattaaatatatctcttcccattttccccttaccaattatccctatttccataatttctcctctaattatttccacaaattaatctatcgagtgtcatatttccatacttagcaaaatacttttgagcagatttaccactaaaattatataattctgatatttttaaataaaactctttctcagaaagctttgttctcaatacagaatttgtcaaattataataatcataatctttaataactatttcactttgtaacttctcccattgttcggtacctggaaatggagttagaattgtaaaagctgaattatatattggattttcatctatgaatttacccacacgctcaaaatccctctcatcataactaggcttaattatataatttccatttacataaatatttgcttcgtttaatatttttaaagcttttttagtgttttcaatagaattatctttgccatactcctttaattcctcatcactagttgcttcaagtccgcaaatagttattcttaatcctgccttagatgctaattctataatctcaggatattttactactgtatctgttctaacatcgcccatataaatatgatttctgtttaatccctcttcaataattctgttaaacaatacctttgccttattaacatcaccaaaggtattagcatcacaaaatcttattacattatatttatccattttcttgatttcttgtattattgcatcaactgatcgatgataaaaatgaccatttgtcattttccacaaataacaaaaattacacttattcgtacatccctccgaagtacttaaatagtgaattgttttattaacctttggtatagtataattatacttatctgttaaatctctatttggtaaaacttcatccaacaaataattttctttaaattctttgtatgtaaattctccaagtgatctagtataatataagctatttcctctatttaaagctataccaggtatccttgagaaattcggattgtcacgatttaattttaattctttaactatgctatagtagctatgttttcctagtccaatagatattatgtctgcttttgaacctacaaaatcctgaggtgcagaggttggatgaatccctcctactgttgtaataattttactatttattcttttcactaattctaataattttaatactccattatattgtgccgttaaacacgtaaaacttacaatatcaggtttaaactcccttatgtttttctcaagatcgtctgcagcatcataattgggattcatatccgtttcagccttttgatcaattataataacattatcattaggtaccactccagctagcatatttaagcctaatggtggtcccaccaatactcttttatcaacagcttttcttgcttcatcattgcaaaattctaatatcctatgcttattaggtataactggattaactaataatatattcattccactcatctcccctatcattcttttatatactgtattgtaaagcccccctgcataaacttacttacttctagtacaaagctaaatatcaagtcattatttttaaagtcattattttttaataacctatcaagggatattattgcagctggaggacctgcataacctattttttgagatacactatagaacttatcgggtgaaattcctagtccaacacattcgtttgttatatactcacgaacaaatttagacggcatgttaaccataaaatactttaatgtcgataaatctattttctgcttatctaacattctttttaaagcattataaaaaattgttttaccattttcatcaacaacatatttacgcattttgtctaatgtgacttgtctaatatgatgttctccattttcataagcagttaatggattactaaaatagcttggaaaattatttcccattacagattcctttttcccacctgctgattccacatatgtatttttaagataaaaaccattatcaactgtatctttgcttgaaagcacaaccgcacctgcaccatcacacaaataccatcttaaaaaaacatcttccttagtaactttctgttgattataatattcaggtatgaaatgtgcactagaaaccatggaggatactaccaaggcatttttatactcaccactttttaaaaaggtatctgctaattttatagctttatatattgatgagcagtttgaatggatatgatactcactgcatatgtcaatccctaattcttcttgtatcctagttgaaataggtggcatttggtacgaataatttccggcataaattaaaagatcgatatcttgtggttttatttttgcatcttgtaatgccaacttagacgcttttacagacaagctaagattatcttcgtcaaatttacgcgttttaccattaaaagcatagtaacaatagtctatccctagcatttccttcataattggctgaactcttgatatccacgtttttattttcttaggggcattaggtatttgtccaatgtaattatttatatcctcaaattttattggattcccaggaaggcaagcacctattcccaacaatttaacataattattcataaacgcattcccccacattttaatcacacaactttatgtatgaattaatttttgattttgaatatatcatttcatttttcaaaatatattccatcaacctattacaataatcactaatttcattctttttaactattttgtctattatcccaatttcaagtgcctcattaacagaaagtaagtctcctgataaaaccaattcaagtgccttccctaagccacataattgcacatatcttgatattcctccaagacctggcataagtccaaatgttgattctggagagccaacaatacttcccttgctgcaaattctaatatgactatgtagcgctatttcaaatcctgaaccaatacataatccgttaattgcacttatcactggaatattaatcgaatataaactactaagtgcatcaatgtaccttttaaattcagaacactcaacaaggctattattttctttaatataagctgtttttaaaatagtctgctttaattttcctatgtcagttccagaactaaaatgtcttcctttacctgtaataataataccttttattttagaatttataatactattttctactatattggaaaattcctcaagcaatgataatgttatcatattttccggagcattatttataacaatgtatcctatgtcacctctttgttcgaaataaacttcctttgcttcacaattcatattattcccttccatttaaatgatctttaataaccaatacacaaaattgtttaaattcaccatacaataataatttttgattaaattctttattatgcatcctataattattaaggcatttttttatacaccttatttgaatatcctgtctattgcatatcattttatctaggtattccattacttgagcttcagcaacttcaatatcaattatgctatttataaatcgcttattgtaaagctcatcagtgccatagcatttattagtttgaagttccttatctgcttcttctctttcatttcccacaattaatttgtaagtattttcacaatttttaaaatcaactgaaatttcatctccgcctagccttatatcaaacatcataattaattgtaataagtccccagaacaataactattcataacagctaaagaaatcacttctaacccttgaaaccaacaaaatagctcatttttaattttttcatctataacaaacaaagaattatctacatgaaaaacaactgtaaaagcaattattttgtttttagcaatgtcgtcatcaagtacatgcttacagcatattaaatcatttagactatacacatatgcaaaagcaacacgattaattatatttatatgaaactttttattcttacccataagcacatatatccagcttatctttaataaattgaggaatttcatatataattctttgttttgatactaaaaccattttagatttagctactgaagcctttctttttgtgacctcattgtaaatattatgtttaaatattaaatagtcatcttcataagtaagttcagtttttataagtactttatcaaacaattttaattctctgatatatttaatgttagtttcaattacaactataaataattcattactttcattataatcagttaaattaagcttactgcataaatcccaccttgcagcttctaagtaatttaaatacactgcattattaacatgaccaaatgaatctaattcgtaccctcttacctcaagcctatattcatgctccataatcaatgtactccctcttatttataatatttcctcttaaaattctttttaaaatctttaatctccattttacataaggcttgtgcatacgctttgctcctgtcatataatagctatttcctattggagtttttccagaaacaataagtttcttatctaatagtattccatcttctgttggaataagctctattttaaaacttccttttaaaaagccatggatttcagacaatatatatttattaggaactacttccacgcatcttaaaatatagctaaaaggtggtatagagcatttgaatttaacctcattgcctacatcccaatatttagactttgaactaccccatataaaggggaagaaactaaaccattttgtgaattttgtcaaatcatatatgtaatcaaatataacctcagggcttccctcttcggtttttataagctctgtcacatcgaactcaacatttgatatttcaacatttttatgtgatttataatcaacagtatccatatatacatcaccatcctattaaatggattctacaatttttttaccaaattcaaaaacatttccccttcactttttaaagcaacttcacttgtcttaacgaaagaattatttaccgaattaataatactttttatctgacgggttgttttaccctcaaaaagttcattaataaattgtttagaatagctaatgtgacttttattatctacaattttatcaactaaaccaatactaaatgcctcctcagcatctatatacttaccagaaacaatcatatttaaggcttttctttttccaacaagcttaggtaatctaatggttcctcctagccctggcattataccaatattagcctctggaaagccaaaaattgcattttcagtacatattctaaattgacaacttaacgcaatttctaagcctcccccaaaacaaatcccactaattgctgcaactgtaataatcggaagtgcttctatataactcaaaatttttttaccacattctaaactttctcttaagtattctatattttctttgttcacacgtaggttgtccacatttgcaccggatgaaaaatgtcttccttctccataaataataagacctcttaaataagaagaatctatccattgttttaaataattcaaatccaaaaaatctgccttgtctaatttattttgttttccattacttatagtaagaatccctattttatcttcgatactaaaatttacgattcctgattcataaatctcttttgacatatactatttttctcctacattagtaatatcattttcatattcatataagagatatgtcgtttgtactactttttctaatgtctctgcaggatttttcaataaatattttccaatactttgtaattgaatgtttaaagaatattttttcttcagtatatcaactaactcaatcaacattaatgaatcaccatctaaatcatcaactacagaagtattatcatttaattcatttatatctacttcacactcctctgaaaaaaaatcatagacaatgtctcttatttcctttttaatttctgatgttaattctctcatagttttttcctcctaaaattatattatttattttagttacttattttgatttaataaagcaacttgtttatctattttttttgcaactattttatatactaagcgacctattagcttctccatgaacttaagatttacattcaaacttacttttaataataagttttcaaatgaatctgtaattgcactatcatctactttaattctttctatatattcatctagctgcagttccttaaaacgtttagtagtaggaaatccctcactgcttaatcccctaaaatagaaatactctggcaacattcctggtgaatcccttacttcaattgttgaatctttaatgaattcatcttcaatatcttcttctttttctcttgatggccatttataatcctcaagcttcattccgcaatttatattaaaagcattttgaagctgataaatcctttcacctgcataaaacatatcctcttttgtaacctcaatattaaataatgcacttaatatttctgcaaattcatcaaagaatgcatgtccctgtggtgtaatactctgcatacaaaataaacaaattcctaaagaatcaattacatatttataattttcatgccaccacacaactcttccctgttccttatctttacttaaagtacctttaaactttcttttaaatatatgtgtgcccaatgaatctgtaagaggattagaaaaaactgatgtaaacggaaaatccttcaaatgatctccgcctcgagtagatgtaatataacctaaagaccatgcttttttttgattggaatgaagtcctgttgacgccttttttatacaaaatgcatatttttcaaccttcagtgtcttagatgctctgtatgcaccttcggcaagtatatcacctattccagaacgatcacttatcttatgcataagatattctatgtcatccacatttccaaattgaaattttctgccttcagtaatatcttcccttaaaactccacgtttttgacattctaaaatcagagctattgtagccgctacttctatagtatccattcccagcttatcgcataataattttaaatgcagcacatctgaataatcatatataccaacattaggtccaaaactggttgcagaaccatattctattctttcgcctttctcacccttatattttccctttttaatttcataagcttttccacatcctaatgtacaaaatttacatggcactttcttagtttcaaactctttcttaaataccataggtgataaattttcgcattttttatcatagcctcgttgagcattttcaactggcagacatttagcttcaccatatttgtccattagtaataacgtaccactgagacccattaccttgaattgaatcgatgtatgactttgttctatccaaagcttcgatatagatctgattttttccctattatacataggaacttcacattttttgcgttcaattacaatagcttttaatttctttgatcccattatacatcccatgcccatgcgtccagctacatgtgtttttgacataaatacgcttgcataacgtatcaaattttcaccagcaggacctatacatgatatttcacaattattatgcctcttcgacaaaatatctgtagttttatctgtatagaacccccataaatcagaagcatcttcaaatttaacattacccttttcgtctataaaaatatatataggattttctgatttaccttgaaatactaagtgatctattccaactgatctcatagttgttggaaaacttcctcctatattagaatctccgtatatatctgttaatggacttttagcagttattgtactacgattacctgtaaggagacttgtaccaactgcagcacctgcaccaaatatcaatacatttttttctgataaagcatcattatacatagcttcagactcaaaaagtatttttgtatttataccagttcctccaatatacttctttctatattcacaagttattctctcgtatgtcacctttttttcagataggtttatgtacactatattattatctatcactttagaattcatacgcttaacaccttactttaaaaatatttatgtaacatttttaattctgtacttgtacattttttattttcataaagcttttatatgtaaagaatttgcaattactattaatcattcttgaaaatctagaaatagaatcgattaaacttacttcaaagaaattataattgttaatgttaattgccttttctactgatgccatccatttcatttcgccccacacattttttacaagctcttttttcaactcacatgaatctacaataattctttgatcatagctagagattataggtatttttaaattgcacacacacaatctagacacaagtttttcatattcctcaattccaatcaaagcatatttagaatggaatgcatatggtgagtcaatatctttagcactcaatgctccctccgttaatgctattgataatagtttatctactctatttttcataccagaaacaagtatacaatattcattgttttcactagctatatatgcataatcacccaattcatttttgtcaattattttttttatatcgctacaagtcatacccgtaactaatcccataccttcatcctttcttgatgtatatttaggatagttatatgacattgataaaagctccaatccctcttcaaaagaaatagccttcccacaagctaatgcagtaattaagcccatgctatatcctaaaagcacagaaggcttaattccatcttcaatatatgtattataaacaacacaatcaattgtataaatagaaacccaatcactgaatttatcgtcatactctccagacaatgacctagttagatacccccataagtccaatttaatttttttatatacaatagaacagtattctttaagtaactccctttggctttcatctaacagagttaaaaacttttgatacttaattcccactccttgaaatataaatgcattttttccactatatagctcattcaatctcatacatctccatattaataattaataaaaaatattatttttattattttaattctatttaaaactcactaatattacatataatacttcattttttagaaatagaaactttatactctaacatttgaaatttctgaaactttgaaaatctaacattattataattttatttcaattacaaatgattaatgtagaaaacgtaaagccactattgcacaaattattatattgaatttaattacaaataatcctttaaatatacattatagtataataatacaccatatccatctatttgtaaatttttttttatattttttgttgttgattttctgtataatattcaaattaataacatattaaccgtataaattaaaaaaatccctttatactccctatattttcataattatatcctccaattttgtcaagctctcttttaaattcattagattgaattacctcaataaattttttaaccacatccattttaagaaattcctttggtatagcaaaatcatattcttcatttcctatttctataaaatctagattcattaacttagcagcagaataaactcctaagccacagtctgcatctcctgctgctactactgctgccactgcaatgtgcgtaaactcttctctttcataaccatttatatcctttgaacttatatttagcttttttaaattgtaatctaaaagcaatctagttcctgctcctctttgtctattaacaaaccttcttctaaactttgatatatcttcaatactttttaggtttaatgggttacctttgggtaccattaaaccttgtattctttttacccccttaatcaatgctatatttttgtcacataaatatttttttatgtacgatatattatatgttccatctttcatatctaataagtgaattggtgcaatatgtgtttcccctgattttaaagccataatccctcccatactacctacatgagcagagctcaaaaaatacttatcttccttcacgtgaagcaaatcggatacaatatcaagtataatatcatggcttcctatacatgtgagagtattttttatttcctcttcatctttcaatagctctaccttaaccttagtgccagcctcataaccttcaatattttgaggaattttcaatattccatctgctcttactaatgacattgtatttcctgctcctctactaattggagttgcaatgtactttccacttatgcaagctaattttactcttacaaactctagatatttaagagatgacattattcgtctagataatgtagcctgcctttttttcttctcaattaaattcattccgttataggaatatactacttttttacaaatattttccataatgaaataagctgatactggatatccgggtattccaataacaggcttgtctttaataataccaagcacaactggcttacctggttttactgatataccatgtactaaaactttacctaaatcctttataacactgcatgtaaaatcctcccttcctgcagatgagccagcatttacgagtacaatgtcacatttgtcaacagccgttgccacaactccttttattagttcataatcatcctttactatgtcaaatcttacgggattacctccccactccttaacttgagccgaaaatactcttgaattaaattcaatgatgtctcccgttttaagttctccacctggttctactatttcatcacctgttggaattatgccaaccactggcattttatatacacaaaccttatttatacctccggctatcatagcccctatatcaacgggggtaataacgtgcttagatgggattatgagctgtttttcaacaatatcttctccaatagttctaatatgctgccatggaattgcacttttatatattgcaaccttatgtttatctatatttattaagtcttcaaccataattacagcatcatattccttaggtattggatcgccggtatcaaccacaatgtaatctttattctccactagctctacatgatttctatcagacgcaccataagtttttttactgtcaacggctataccatccattgcagaactattataaaatggagatgatattttagcataaactggtgaaaacgaaactcttcctaatgcctcataggtatttagaatttctttttcactttttatcggtaacaattcattaaaatacaattttatagattcatctaaatctttgttagacaaataaatttcattagccaaattatttaccaccctccgtatatatttaattgagttttataatattgattatgacaaatcactacttacaacttatatatttcaactacttgtccttcccttaagccctctaaatctttttctatttttatatatccccacgctcttgaaaatgtagatattaaaccggattttccaaatatgggtttagcaataatcctatctccatcattttctaatgcaacaggcaaatattcttcacgtcctttagctttatgataattaatactcattatagactttacagcataaacttcctttttatagcacatggctttatttatatattcccttataaatattatgtatactattgagcatgctaaaggatgacccggaagaccaaatattattttatctccttttttagctactattgtcggttttcctggcttaaccgacacgccatgaactaagatttttccatcttcaaaatcttcaatggcctttatagtttgatctttttttccaacagagctcccacctgaaatcactaaaatatcgcattcttcagttgctctgcaaatagtatgctttaaaagcttataatcatctttaacaatcccataatttataggttcagctccatcatcaattatagcggcccaaagcatatatgtatttatgtctcttattttaccaagtgtcagttcatcttcacatgctattaattcatttccagtagaaataatccccaccttgatttttttgcaaacatttacatgtttgattccaatacttgcaagtacacctacttcatatggtctaattttttcaccttttcttataactatattgtcattttgtatatcctcacccttttgtattacgttatctcccgatgctacaggagaataaactagtatggtatcttcatccaatttctgagtatattcaagcataattacgctatcagcatactccggcaacatacctccagttggaacataagcacattcaccatccactatattaaaatcagttacttttcccataagaatttcacctttaagcgtaagtatagctggaatagcttcagtagctccaaatacatctcgtgaatttactgcaaatccatccacagtagaccttttaaattcaggtatattacaatccgctctaatataatcaaaagctattctgtttacacaattaaaaatatcaacttgttcgccttctacctcaagatgaaaatattcatctataatatctttcgtttcgtccacagatgacactttaaaaaaattcatttttactccctccaactaactatgtatatatgaagaattaagtgaataaccatttaatatatcaataccatgtggaatagctggtaatacaaattctaaactttctatagctgccttcgtacttcctggaaggttaattattagagaatcttttcttattcccgaaactcctcttgacagcattgcatgactgttaattttaacagaattcattctcataacctcactaataccaggaacatctttttcaatcacacttttagttgcctcaggtgtaacatctcttttggcaaagcccgtaccaccattagttaaaatcaaattcacttttaattcatcagccaagtaaattaactctttttctatatcacgcctttcatcagggataattttataaaagctaatctcgtaacctaaattagccaataatttttttaattctaagcctgtaccatcaactctttctcccctagatcctttatcgctgatggttaatattgcaattttaatcacgatattacctccttaaccttttaaataataatacatagccctagtgaatgcatcttttaattcttagtgcagatgaaacaaatgccataaaacaaattatatataaaaaaatatgaataataaatagatataaaaattgtgaaaacataacacttatatatgtagctattggcaaaacataaaatataattacaataattcttccaagtaaatcagaaaaaaatatcatctctttgcttatatcacgcaaaaagaaagaagttatcacaaactccacagattttaagattataacaattaaaaaccaaattgggagcaaattaaaactcaactacacaatataggaaagaactatataaaataagtctgccacaacatcaaaaaaagcaccgaggggcgatgttattttaaatagccttgcaagtttgccatctaaaatgtcagttaaaaatataaaaaaagtaaggactactggtattaacacttttgaaaaataatttatagtataataatttaaaaatagtgtaagcattactctcaataaggttaaagcattagataagttttttattaataatttcataatatttatttccttaaattataattaatatgtattattttaataatagtttttagtataaaccaactctaattttattttacttattggcttctaaatataactttaaaccatgaattgtatttaccacattttcaatatgtgctttagtcttttcattcatctcaacttcctcttgcattgtgaaggttaccctagtcttattatctatcgattcaagagaatatatgcctattggtttatatggacctttaagaacttcaaaggcaacttttttatttttttcacactctattatcttaaaatccgcattgattatcctaccagtaggtatccttatttcttgagagaaaacggtaccaacatctacaggttcaccagaagtattttttacattataaatattatgcttccataattttaagttttctccatttaaaacgaattcataaacttgttctatttgcttttcaattaaagcagacgctttagcatataccatatcatattcctccttcatatgttcaaaagatatttaaccatattctctatacagttaaatatccattattattggagcttaaaactcgttctatttctgttattgagttaataatttttttccaaactcatatgcttcttctttaaattttttactttcaaacttaatttttctatacggttttactccatttaagtatttttccattatatcaatttcactttttttagacatatctcctcctgttgaaaataaaacaatcttttgactaggtgaaatgttttttatttttgaaatataatctgttactatagataatggtttccctccataggtaggtgttccaaaaataattattgaataatctgatacattcgtagataaatgattactaggataatttaatgttacttcataaccttgagtatttaatcctttagcaatttgattagctacttcatcagtaatactagacattgaaggttgatatacaattaatgcccttttaggatttgcctctttagcttttaaaattttctgattggcttgtctaggtttatttaaccttgaaaacatcaataccattactataattaatagaatcaatatgattccaataatcagtatgattttttttaacattctaattttcccccttatgtgttgattaactgcatataattaaaatacatttatactatattttatttattacgcaattattacaaatatatttatgcatttttatgtatttcttctttataattacatttagccttataataatacttatacttaaatttgtcaattaataaaataaatacgtatttatataaattttcttatactctaaggtaccatttgccttataaaattacttttttaatatttttattctctactctgcaagaaataactttccatctaactgttttgcaaatttagggaaatattgtattttctattttatatcgtctaaaaaacattaacatgtgaaataaaagtgctagacatgtaatctaacactttcctctattccttagttccagcttcttaacacttaatgcttgaaataaattaataaacaccttttttattttcttaaagtaaaaaatatgtttatctatgattatacctacaaatattatcctatctttatatatatagcaatatactttttgtactgcaaacatgtagactgtttacttatatatcccccatgaagcctttaccttaaatcttttttcataaaattattgttgctaaaaaagaatagtaaagacttaaatttgtctctactattcttatatacttatttttatcacaaatttttcaaaataaaataatgccatcacagtcaattaaaatcttgtaattattctttaatttaaagtagttttatgtatcaaacaatgaaaacgatctttcgactcttcaattatcttaaccaaactgccaaatttccgctttagtaatttcagcttatcaacaatattattactttacaatatcacttttctcaatatttccattcaaaggattaataaaatatcttctagcatagaaatcttttgcagttataacatttccattaacattcatttgctcatacggaagattattttaatttggaaatactgtatttaatccttgaactctccatactaattttccctgtttagaaattgcatataaattatcgaattcagttttatcaaatggtattcaatataaactttcctacagcccaaggaataaattctcttcctttgtaaattactttatactcttcactcatcattttataaatatactatattcttcatcggtaaaagttttatcgatttctccagcttttattaataattcacaatgcttgtctaataaaaataaagcatacacacgcctatacatagtataatatgcaagccaattttctagtttcaaagtttgaataatcaccttattataattacctataaattttactcgacttgtttcattatctattttttctaaacaaatactatgctcttttataaagttattaaaattataatatatatcttttactccaatcctttcaaatgctcctttaagattgtttaaagaacattcatattcaccaatattaatatcctcattattcatttgaaatttataaatgtatttattgtgataccttttagataattcaatcaagtaataatatttacttgcgtcttgctcattatcaaaagtctcttttatttcttcctcttcttcagtttttctctcacctttaacaaacgaaaaaaaccactctctatcttttttttctaccttataataattttcaccttgttcatgatattcttcaataaaattttctccagatattgtttttatattaaccttattaagtaaccttgctacttgatttatattcatatctaaattccccttacttcaattttttatataaccattattttttaaattctctactgtagcatcaacataattaccatcaatatctgcggttcgtctgagtgatttgattatttcacttctgtagcatcaacataattaccatcaatatcctttatcttatagtttgcgaaatattgtgtacccattcctttttgatcaaaccaaggtgcaatatcacctactttacaatcaaaattccttaatatttcataacgctcatatggtttatccttcataaaggaaagaatccgttacgttttgacacataataagtgatgcatcccatatgtatgataattcaagtgaaactaatattttgtttaaagctccaccaaagttaagggtgatttaaaaccttaaagtcttaaatcacccttaatctactattcattaattttccactaaaccatatataaagtatttatctttcaatttaataaactcatcactttcacttttcaaccttttatatatacattaaaatctttaaatgttttttgtagttatctatttccaacgaaattaaagcaaatctcaattcactttcccaaataacaacactttagtttttcttttatttcgcttgttaatggaattatcaatgttatacacgttattaatttttcaaattcagacaacaacaaaatgtaattataaaatactattattgcattagaaaattcacgtccttttacaatattatataattgattatcttctctacaataattaacatcataaagtccatcaacattctcaatcattatagctttacttttaaattcacctatactaaagaattctttattaaattctttttctaaaatctttgcaatactatctaactcatcttcatcacacttactgatctcacacttaactgataattttgcatttggatgttcaaatatttttttaattaaaacatatattccacatactgcaaaattataatcttcaaattcacaaatttcaaatctttctccgcgttgaacttcatacaaagtccaagtactaccatatttttttattttgatataaatttcttggtacgcaccataattagttaaatgataaacttctcttcctcattggtaaaaagtttatctatttgtccagcttttatcaataattcatgtggttatatcattcctaattttacagttcttttatattattcccatgctttttagtgattcaataagccatttataaaaatagttacatgcatcattttcattgtcaaattcttccctttcggactttattcctctttcactataataagtttcccatttaccattaacataatttaaacaatatgcttcatttggtcttctaccatctaatgaatatacttctttgggtatttggttgttaattaattttatttttaattgatcttttgtcattttatattatttcgaatagtatttatttaaattattcagtcgcataataaaattcaaaatagaattttcatctaccattaaattgcttaaataaagtaaaaaatcgaactcatcttcatcatctccgaatgttaaaacaaatggacttatatatggtttatatataatattacagacaaggacttcctttatttttactctgaagttacgcttaccatcatctagtatttcatttgtgcaatttatttcgtctggcttagtttcataacttttattattatattggaaatataatttaccatcatcaatatataatcctaatagttcaccatcttcactaaatccgcctacaccattttctatatcctttatactatttgcatcaactattgaatatccttcagatgttatattaatatatgtattctttttagaataattatctaaaaatatcataactagctcctcctaatgaattaatcctaatagtgtatttattacatcatcttttttcatgaaatttttaataacactactccaaacttcgtctactaatcaaataaattacatgtttaattgacattttatatattcattctctgtaatatattatataatttagttgcactcattttagtcttaacattatcaatcacaaactctacattcttaatgttattttcaatcaaaattttaattatatcttgcaatctattgatatctattgatatctcttttttatttacatactcttttccatatttcttgcactctgtttcgtccgtaaaaaccttaatgcaatccctttcgattataggagtaatttttcttgttaccaatttctcatctgctttatcttcactcgttataacccataatttattatttaaaaacctaagactatttaaggtattcataattggatattcacttttagtcaataccggtggttgtccttgctttataaaacactcatttaccaaatcaaatatactacatgtcataaagtttcttccttcatcaataataacctgacaaactccagcaaacattgcaaaataagacgtcaataacagttcatcaaattcaaccattttcactaaatatatatcttttcttttaaattgataatattgtgcatattcttttgctatctcttgttctgaaaaaagccacattgtaggaatattattatttaatccaaaaaaaacttacctttattgttcttaacatcatcatccgttgtatttctattaactatagtatataatcccttcaaactcactatagattttaaaatttcattgtatttctctatatatttttccgaacctttacatattttatttagttcatttattttttcttgtatgaatatactcatcctaatattttctcccttaactatccaatatgatttattctaaaagcttctttaaataatcctttatatattttggttcaattctagtaacttgctcccccatgctctcaaatttcaagataggcttttttatttcaattagagcatctacttcttctatttcaacttcttttttaaaaacaaattgctctacttttttaaaattataaagtcttgcctctttttcatcatttgtacctaatgtaattttaccagtatccaatataaactttcctacagcccaaggaataaattctcttcctttataaattactttatactctatgttatatattatatctacatcttctatagttacttcctttataaatatatcattatgtatatttcctagtaaatctactaattccttaaaaccttcctcgtacactcttgatctaagccttactttcatatttctaatactagataaatataattttcctttatatattgaatatttcacactacttcactcctataatccatttttcagttaaatcttcatcatagataaattgttgtattactttcccattattactatctctaatattcaatatatcaccactctgaaaattccctacataacctctttcatatgtaaattcaggtaatacaacatttttacttccagtaaagcctcttgcagtatatggataattttcagcatttgcttcccatcttggaattatcaattttgctggattattttctttatattcgatagttccataaaatttatctggtatccctatttgtgttgatactccatttacaccattatcaatcttgaacattgttccatcataatcaagtctagctccttcgtaattctcatataatgtttttagatttttactatgttcatcaactgctataaatcctcttacacctttatattcttcgtcatacaaatatttatatatatcgctttgcggaataacctttgtcatttttgtaccaacactaggtaatccaatttcatctctaatagaatctactaaagacttttcactaatatttagtactctatcttatcaaatatattttctcttttttacatatttgttaataatgtattttaattaatagctgataaaaaactatgaatctgcttacttaattttcggccgattcattaatttaggattattatttatttctatatttttattatctagtgcatctcttgtttaatcatctttagtatatataccttttttagtattccaaaaaaatcttctatagaagaacccaattcagcattataaagcattaatttgtagtacaaattttcaatacagaattacaaattccgttaaggcttccttaagttcagcttctttgattttatacatttttaaaatacctatttttttaagttaaacaattattaagttgtagtaagttattgaaacggactatcataaagccatcctaaatatggctcttcaattaagaccatgtctttcttattaaaattatatattaatgcattacatttggttactacaaaatagggaaaaatttccttccagctcttaaacaatatatttcctttttcatttaattctttttttaatttttcactatcatcttctgtcaatgctatattaagatacctaattccctcaacatcaactagaagataatctttattattttgtattacatatgctcctccttttatatataaatccattactataacttctctgtataaaagttttaacatatttgtatcgagaactaattgagactcatctcctaaattaattatagctccttgaatttccattcttaaaatatttctaattatgcttatagcatcaacttcaataatattattaatattcaaataatgcttactttcagttagtatttctttacttgtagctattactacatatttatttttgttaataattactttagccaatgaattttccgaatcacatgggcaataatatatcattgcttctcttgaaagcatttgtaataactccaataagcactcctgctttttacttatttctataattctatttctaatatgatcattatacattcttgtacctcaactttataatttcaattaatgtttacttaaaatttcataaattcaatatagtcttatcttccaatattgtatctacttcgctctttcttatccatttatgatatacagaacgttctatgaactccatatttaatttaacccctacttcattgttactagtataaattaatatactatcttctttttctgatataacttgaaacttgtatcctttataaatacaattagtctgtatatagtatatttgttcaacatcgcttctttttatagttttatattttaaatcactatcatctgattttagtttaatgattttattttttttatcataatcaagaacctcatattgtctttgcatatataccgtatatttgccaagtaacataaataacccctctttttattttatttttataaacttatcatttatatattttccaattaattcttcaattcctgttttactatttaccctatataattctgcaccttcgttaggtttcaaatattgcattgtatactcgggaataatattaccatatatatctttagtaaaaccatgccctgtaaatgggtctggtgatgtatcaaaaccaccaattggtggttttgcaccaactacctccatagttggtccatatggtatatctattttgtctactgcgtctgttttaaatcttattattccataatccttatctactcctactgtaaatggagtattcttgtacccaagcgctaatccatgataaacctcttgtaatgtacttaacgctttagcatcttgagctttagttataaatccacctactgtattccatgggttatcttcttttatatagttatttatttttccaccatcaatcactttttgtaatattgtatcattttgtggatttggaacttgttctctaatcttcatcataattcttctttgttcattagtaagttcggaagcacctttcattctcattgaattaaattcatctaaactaatcttctcattttttaatatagatgatatatcttcttgaaatgaatttattttaagtacctcactttttgagaagttagtatcactgaccccctgattcttccccacattaaccaacggcatctctttgccgttttcaatagcttcatttattctatccatgctagcgaggcctctagctcctatttcaaattcattttgaagttcggctacagcattttggttactaaaagccatttctgttaactgtgcatccattacttcttccacttgagttctaactctaggcttttttccagtaacaaaatactctatcttatcaaatatatcttcctttgcaggcttattataccacgcttttttctccatttcctcttctttatcaaattcctttaaaaaaccatcaacctcttttgtggttttatcagcttcttttaatactttatctaaattctcatcatcattgcctctatataacacagccccactagccaatcccattgaagctgctaaagctttatcagagtttgcaatggtagccttagcatcattaagtttaatagataatttatatatattatttgtaatttgctttcctagctttaaagaatccgttatgttttgacatataataagggatgcagctgatatgtaggataattcaagtgaaactaatattttgtttaaatctttgattatgttgtctaaattaccacccatagtgcgaaattcaaaggtcatagaatccataatcatatattccatttttattttgtctgccaaattcagtccgccttccttagtaaaaaaactttttacatctttttagtttactaatatataatagtattttgtggatatgttttcaagtcatttttaaattatattaaattttatatttattttctatattattctttataacttaccaaaaatacttattattaaatttatgctgcaatatatatattaggacataataaaaaatgctattttaataccttgctgtacaatcaggtatgcacctaatccacatttaaaatattaggctatattttaaaatattgttaaaaatatataaacaattattatttctacctaaaataaacttttagaaacaatataatctatactttgtatacaaaatcttatataggttcaaataaatatctctagttattcttaggtgttttatggcaataaattgatgaaaagtaattaatagtatacaatatagttatcttatataattgaggtgagtttatgaaatatttagtaagaacatttaaccttacaaaaaaatataaaaatacttctgttgttgaaaatctaaacttgaatatagaacaaggacaaatatatggtttcttgggtaaaaacggtgcaggcaaaacaacaactttacgtatgattttaggtcttatgaaaatctctacaggtgaagttgaattgtttggagaaaaaaatccaacaaggtcaatatataaaaaaataggttccataatagagtaccccggattttatccaaatcttacggcagaagaaaacttggacattcatagaagaatgatgaaaattgaaaatcaaaaacgcataaatgaaactttaactatggtaggtctcgattcaaattcaatcaagggcaaaaaagtaaaaaacttttcacttggaatgaaacaaagattaggacttgctagagctcttctacatgaacctgaacttttaattttagatgaaccaactaatggtctagatccattggggataaaatccatgagggaaactcttatagctttatgcaaagacagaggaataactattttagtatcaagtcatctattaagtgaaatagagcagctagcaactaagataggaattatagataaagggcatttaattgaagaattaacctatgatgatttacaaaagcgaaataaaaaatacctaaagctaaaagtaagtgacgtaaaagaagcctgctctcttattaaaaataacttaaatataaaggactatgaaataattggaaaggatgctataaaagtttatgaaaaaataaatgagagttccactatagctaaaactctcataaaaaatgatatagaattatacgaaatgtcttttagtaaagataaccttgaagattacttcgttaaagttacagaaggtgactctaatgtatagtttaatccaatgtgagtttctaaaattacgaaaatctaaattttatttaataattatcttaatgacctgctgctatcctttattggtattcttcaaaaatataagtgagtcaaatttattaaattggaatcaatatattttttctgtggaaaatatgtcctttatcattacttttactcctatattttgtttaattagtgcctatatattttcaagagaattttcctacaaaacatctcagattctattttgttatcctcaaagtagaactaaaatatttatttctaagcttattactataatggttttatttgcctttttgcttttcttagaacttcttgtaactattttgttaggatttatgtgtccacatgaagttttaacttcacaaattatatatattcattttaaattatatttatatgttttatttgtagagtgtactatatcccctatatgtatcttaatttctctattatttaaaaatacggtgacaccactaatatacggtatactcatctccgtatgtaatctgtttatttctacttattttgtagttaaaaatgcaaatggaggcttaatgaaaaacattatatttaatatacccttattttacaatgttcctatattatattcttgttttaaagcaaataatggtaaagcaatatttatagaaagttcttcaatattgtcacttcatcatatatttatttgtatactaacttttataattgcaaatttattttgtattttatattacaaaaagctagaagttaaatagctgtctgcactagttaaggactataaaatacaatactatcatgaaggatggaaggtaatatatatgtttaatataatttattgtgaattattaaaattaagaaaatcttacttttatttaacaattatgcttgttaattttattatccctatcatgttttttttattactcggtggatcacttaaaaatccttataaatatttttacctatctgaacaaatatactttatgtttatcaatactcctatgttgtgtttgattagcgcatatatattttcaagagaattttcctacaaaacatctcagattctattttgttatcctcaaagtagaactaaaatatttatttcaaaaatattatgtatacttatattagctttgattgcacttggcattcagtttataatggttgttttagggtgtgctttactctttcataacttaattagtatccagactttactttttcattttaaagtgtattcatactttttatttagtgaaatactgcttctgctaattagtactcttttctcaataatatttaaaaatacattagtaccagtaatatatggaatattaatagacataataaacctatttattttgcaattttgctctatatataaaatttctatatttagtaatatgttaaaacaaaatctagattacattccatgctcctataatatagtcatacttggtaatgttggcaatgctattaataacaaaatattacatctacattcttacacgttactaaaaacctcaagtattataatctgtatttttattattgcagtagaattgttcgtttgtaatttatactataaaagatgtgatattatgtaggaaaatatagctttgaattaataacaataccttataagttgagtatttataggatcttttgttacaatcatgcagaggtgaaatagaaatcaatttatacaaaaattttaacatactcgttatattgttatatggaaattatttttagctctggttattgctacataaaaagcctctgccatttttgacatttccttagccgccttactagtaaaagttaagagcataacctttttaatagcaggtatgcgactcttgatgaaagaactctagtttttctactacctgcatctcatcttaacaatcctgtctatttaatggtgctgttgactgccttctagccaatatccaattcacttaataattcttataagaaaaggttttatatgctttaacttttggcttttcatcacctgcaactgtttgtgctttcctatctacaagaagtttattctgtacaaaagttacgaaacacgttaatgcatccatgttttcaagattagcatacactccaattttaccttgcgtagttgatattaatggattaacaactacattttcatctcacaatgtaagtttttctggtgtaaagtttcttctaactttaattttgtacatatagacttatagattcatgaggtgttcttttaataaatacttattcatctcctaatgttgcaagttctttttcatttttttaccaactcgttattttctcaattattttatattttccttactttatcacttacgaaatatcccaagttaaaattataaaaatatatacgtaaataaaaaaaaagtgactagtaaaggagatttaaactagccactgtaaatttaattaattattttcgtttccatgcttatataatattctagttttgtgacaacttggttacaaaatcaaatataatatgttaataattttattctatatttatatttaaaacagcccttttatctttaaattgaatattaacaatgaagctctgttcttttgtagaatacatatccataacaaattgaaaactgtccgcatcctttccttctatatgacttatcactccatgacttattacctctttattatctaaaaaacagagtttatctaaaattatcttaagtttatcttctttatctataccatacagataaaaaaatctttttttattgtctccttttaagaagtatttttctaaagcatcatgattactccttatataaaaagcttctctgaaaagctttggcatatcctctgatatttcttttatcctattttctatcaaaaacatttcatccaatgtcacaagcttagaattgtataaatcatttatattatccaaataaaaacccccactactccttatctcttttgatatatttgcttctgtgtttatattatttgtatccttactttcaaaatttttaagcctatcttcattcttattttcttctttaacttgggcttctattttattttctttcttccctttttctattaatttgatcttcctaattgggttttctatattttttttagggttactatcattgttattttcacttacaaattctagtgtcgaaaatattgtgcccagtaaaaatatagaaaacatcacactagctaaaattacaacctttaattttccatgcatctttaattattacctcctcacttttatatttacagttccaaaattatcacatctcgcagtatcttcagcgccaccaaagcccatgaataaatctatgtgattcccttttattgctccacctgtatcatgtgctgtataccagccatttaaatcatacctttgtccatttttagtttgatacctcttattatcaggaaattgaagatataccctagttccaagttttattacgcttggatcaactgcgattaccctacttgtgaagtcctttccatcaagattagttccatctgctgtagttccgccgccttccatagcatcatgaactccaccgtaagcagtacatataaaactttcatactttatattaggattgttaaatgcccaaaacatattagcttctgctgctataccttccattggatatttatttatacctgtggctgggttaggatcattaatgagtacctgtccatctgtatcaactccagtaagtacaataaaatgccctcctttagtaaaatgccctgagtgcatacttgcaacaactggattaccgtttttaagctggtcatatacatagctataattacttggttcaatttctcctgaactattaattccaaaccttgaagtagaaccagtatcaaataatgcccaggaagtaccttcaccactagagctgttatacccagaagctattgaatactctgctgcttctcctggatcgagtattccatctttatttttatcccatgctcctaaatttcctccaagtcctgaaattatcattgcaaagcttgtcggaccgcatccacttgtagcaacatctccctgtccataaggaacattggcccacctcgcatctgtttgtctgaaaagaggtatttgtcccccaaagcctccatctgcaccagcttgaagtatatcattcactatattatcatcgttaggatctttattcatccagtccccattttggctctttgtatcgtagtcattacttgcaccttctataacaaaatgtgcagccattttaagcttatcttcagtatcctcatttggaaactgctcttttattatactttttaatctctccatattctttccgctttcagtaaccttatcaatcacaggagtatcaacctttgttgttgtagttgttgtttctattactgtctccatttcaggttttttgtttggatcattagttgccggttgattatctttaggtttttcatatgttctagtttttgtttctgtcttagtctctgattgaactctatatgttatatctacctttcccttaagtgcatcagcacttgttaaaagctttacttcttcttttgtaatctgtggtgctacattgtcattttttcctgtagaatcttttgtgttgaccgtaaccgttgtaactatatagtcatctttataattaaaatttggctttaaaagttctgaatattcatctataatatcttcagcaccagcaagacccgtttgtccattcttcgatactatcttatctatgtcttgtcctttttccatttctgcaagagatataaaaccttcaacattaccttctgtaagggctactttctttgccataccatacatatcatccataggcccattagcatcttttacttttttagttaagtatccttgaagttctttgttttcgtaagtattaaaattatcacttattgtcctatctcccataaaaccagttttcgctacggatatagcgaatataactatgaatataaatagacagaaaataagtccccaaggaaacattatcttttttattaatgccttgagaactttcttacctttattcttagccatatttttaaacatactgcctaaccctttacttcttttcaccaattcaacctcccttcaaataaaaaaggttaagaactttaaaaatcaaaattcttaaccttaatattttcattcctatgaccattcattgaacccatctattgatgtatatggattagtttgtgctataatttttcttttgtctttatcccctaacttattaaatggatgtgcttttgttaaattcatagcagctgcattattatttcctttagatatattcttagagaaactacttacattatgagctgttcttaaagttttacctactttagtattagcagtatgatttaatactacatttgctggtttatttaaaacttttagatttttaaatctagcctttaaatcattatttccaccaaataaaatctctacagcttcctttctatttttagaaagtccgagcttttccatctgcgaagcagtcttataaatggctttagctgttgaaattctattctgaactccacttactaaatttcctcctgcttgaactactcctttaaacataggatctcctgctgtcattgctgtaagtaatcctttggttctacttcctgccttattatttgacatttcagcatttaaattatctgctagtattgaattgtttaatccttgttttgcactgtcttgtttaaacttctctactgtagtatcagatttatctatattatattctttatcattgtttccaactggaaaaccatcacccatgttataacttccgtagtcttttagattatctccaaaagaagttgcattagaggatacaggacctgaactttttacagaatttccgcctttattagtactacctaatgtatttccaaatattttattagctacattagaggctttaaaatctttaggactacctgctacttcaccattactgcgatttcctcctagtgtcattccaaaggctgatgccatgcctcctgctatagctccaacagttccaagtgctcctcctcctaatgtagtttcgtctaatcctgaaacctttgtaaaaaatccctgtagtgaatttctaagcatttcggcaaccttagttaaagcagtaatccaaattaaagctaaaagccaattttgccacgttgaagctccaagagctgcaatcattactgtaaatgtaaaggcataaaaaaactgcatagctgcatttgttatcatttctccgaaccatattgcagctgcatgtactttatgatttatcccccatagcgctattgctattggagtaaacacatacataactgtaagaacaacttttctgcttaaaaagataatatttattcttatattctgccaagcataaagtaagtgtactatggctgtagtaactggtgaaccagttttaagagaatctaacaaagaatatttaaatgctgggctacttgaataatcccctaaaatagactttgtagccgcatttaatgcgtctgtaaaggcattaaataattcaaatagtccttgaataaataatggtgctgctgctaataaaaacacacataaaaaccaattcataagctcctcttttaaatctattttctttgaaactgaatctgaaaataaaatcatagagaagcccgtttttgcaatcattattagaaataaaggtgctactaatgtacacataagagtatacaaatagtttaaattctcccattcctgattttcaaatggtgctaacccttttttacttgtagaaaatattaattcaccaagtggcttaaaccctatattagcgtctataacattttctactgctttaggtacagcatctataacctctgctacacctctttgaataaatgttccttgatcttccttatcgattttatttgaatctgttttataggttgaatttttagtattaagatctattcctgaagtattggccatccaacctaaaaatccagcaagaattaaacttatgccaagtataaaaccgccagctgctattttacctagggactccatagccctctctctggtatcctttttatttgcacctaaaagcatctttataccaagcataattattgcaaatgccattgatattccgccaaaggcacttatatattcatatattattttagtaggagcatctgcattccccgatataaaattcaatttaaaaccccctctctatgaagttttcaccatatcccactcaaagtcaaaaggctttacatgcatgagtacaagctcctgctctgaaagaagtattgcttgtcctgaaataaaggtggtcatgagctgttcacatcttgatgataagcccaaaaattcgcataccttctttgcaaccgaagcttcctgctttagaagtatttttgtaccacatagatgtataatagcttctgtctgtttactccctataaaatcctgcataaactgagttgctaaggtaagcgctatcttaagctttcttccaagccttgctataagctctaaaaaatgaagagacctttcaaacttcgcaaataaatgtccttcatcaactataacttccttttcaatatccttgtatttgtaatttgaaaaggttgtccatatccatgagaggctgtttatcatagcataaaacttagtaaattcgtcatttaaatgtttataacttatagcaattatcttgctgtcaaaacttattgtggatttacaatcaaacattgccataggaccatcaccagttatcatcttcataacctctataagctcttttactccatctgattttatttctttatttttctcaataagagcatttcttaagtcacttaaggttggtaaatcctttttaatattacctgtataaaacttaccttctttttcataagtcttttcttcataaaggcttttaggatcttctgtaatacctaagttttcatagagctgtgctgtacactcatcaactgctgttatttcttcgccctgaagtggattaccatttctaaacttctcagaaaatattgagatcatttctattatctctgaacgttttccatatatatcaatctttttcttttcattttcatcttcctcaacttctatctcaaaagggtttatacctgatttaactcctggtctaagttgtatatactgtcctccaagcttctcaattaatggttgatattcctcctgtggatctaaaattactgtccatcttccagccgctgctgaacgtgctgccttaagctttaagaaaactgactttcctgcacctgtagttcctgaaacaaatgtatgaggatttgtaagtgttggtgctcctataaactcgttatatactataggtgactttgtaaacatattttcaccgtaaaatataccgttcttatggcaaagttcagtatttccaactggtattaagcacgctacagatcccgttatcatatttctaaatccactggtatactctatatttaaattaggaactccagtcaaaaagcctttaagctgatctccaacaagacactttgatataagcgattttcttgcacaaatagtgtcaaacatttcagctttatcatccagtgcacttaaatttttcccccataaaacaactataggctgaacataaaacattctttctgtgttggtttgtatttgggccctggtttcatctaaatcctccgctgcaagtttcattccataatccattgagtagccatgctttagctgtaaatttatattactcatgtattgactgtactttcctgtaagctttcttataaccgccgagtctggaatattttcaacataggtcgtaatatcaatgtcccccatttgaaataattcgtttaaatatcctatagtcatatttctgggaaatcctattattgcataaactctagcatacctacctggcccaagataaatataatctttaccctccacaattccatcaggtgttataagatccattaaatttatagtacctttcttaaaaaaatcgttatcttcctccttgttttcttttttatccttcttgaacttcaacaacttgtcctaccccctcgctatataaatcaaatgctccatctttctccaaagtctctatttttatatttttacctctattaaataggtctgctaaaatttgtgctgtactttcagaattcaaaagatttatcttcattctagctcttgaaagtccaccagctatattatcaattctactttgaagctcatttaaaacctttttttcatctctatccggaagatatgctcctactgtacaaaaactctttctaacaaaaatacctttttcatgttcaagtttcttatatgagctataaagctgagaacaataatcccttagattatctgaaataagactatcactgctgttcattgtcttttcaacaagctccgcaggctcctttatttctatctttttcaaggttgtatgaaactgaactgggaaatttagtgacaatgctgacatcataaggcaatcctcaaaggaagtttgttcttcatccgttaaaagctcaaaatctggtgatgatattcctaagttaactcttatagctccatttttcagataaattttacttccctttattttttttattttagtgagcttttttaattcactgttatttactttaactccatcttcattattttcatcaacttcaacacttgcagctcttttattcttgggtttattttgttttcttgtatagaaaacaactccacctaaaaagataaaggctaatacaggaaaaactacagccacgactaacatataatttcctcccttctatttttcaaatttaaatgttttatttctgaatctaaacttaatcatctttaataaatatttatcaaagttataggtatcgctgactttataaaaagcacataaagcagaaaaaatgacaattacaaaagctataattaatcttataacaagattaattggatgcagtgttatattaggcgagtgtcctaagcttcttgtaactgtcatgtagcttctattcattaaaaatagaagcgcaattgaaaagacagaaagtattatccaaccaaactgccttaaagaaatatacccacctattattttgtcttcttcatttatgttgaaaggaactttaaagtacctcatattttcactccttactgataaaaagaggcagatttctctgccttgaatttattggccaaaaccgaaaaatagtcctgcaaaaatagcaaaaccacctattaaaagtgatgctattattactgttaaaatagagtccatagcttcacttcttgcctcttgtttcttgcttgccataagcatctttattcctataacaacaacagctattccaattaaagctcctccaaaggcttctgctataccttggttagctgtaaaaatatgtgaagcaacttcaccaggagtatgttttgttatttgactatctgcatacacacgtactttcataaataaaaggctaaaaactgatgacacaaatcccaatactttactctttttcacactaaatcatcctctcacaattttattatctaagtattgtctcaattgattttaaaattccaataaagcttggcataaaaaaataagatataagtactaatgttataacacaaaaattcacaattcccattttcataactgtcctgctgtgaaaacaagatcctgttattattaaaataactgaaatacaatatcctaaaatagctaaggggtatattatttctgaaattgttttataaaaaaccaaaataaccttagtcagtttatcacttacaatttcaggtgaaacgggctttatttccatacaatcatcctcctttacaaaaagagaatagtttaaattcaactattctttaaactattctgtattttttttaaagcgctatatttaatgttagatatttttttgtagacatcttagttattttagaaatatttttcactttctgatccttaatcagtatctcccgtattatatatttctctaactgtgatagcttgtccgcattttcttttaaaataacatttaaatctattttttcctccactcttttgtaatttacatcctcataagcaaacttgtcttcctcactaacttttccatcaaaatacttcttctcatcaagataagctacattatttaatttactaagatgcatcatatctgcatactgttcatagctcaatcctattctttcacatccatacttataacatgtatcttctacttttaattctgaagctcttctcttaaacttaactattttagaaacctgatgctctggtattttaaaatagctatatttcttttttatttccgaaattaaagtaaaattaatcatactataaacataggttgaaaacttaacattcttatctaaatcatatgaatttattgcctttattacagctattattccttcttgcataaggtcctctaaagataagcttttattatttaagcaaaagccatttgcaattttttttatatacttcatactactatctattaaaaagctctttgcatctttgcttccatcctttgcccttaatattaaatcttttacttccttatcttccatgtaaatttatttttgttggaagatcattaggtttacttccacaattctcaacaaattctaggctttcattcagaggattatagttgtaatgattaagattcataattatcattcttctatttgaaagtttagttcttctagacatgcttatagcattttgtctttgaagcattaataacactttcatttcctcttctttatttacacttctttttctccttatggctattttttttctttctttatttatttttatgttttcctcttttctcctcaacttctcatttttgtaatctgaatcagcttttatagtcctcgttactaaagcattacttatattaagtatattggctatttctaaaaccttcatattttttttataaaacatttctcttattttttcttgtctttcttctatttttgttttcttgttctttcttctaattttgctttcactctcatacctttcattctcttttaatatagagtatatatttgtcctacttttacctaaagtttttgcgatattactaactgacataccttcattaaagtacataaaaagcacttcattcttcattctttattcacctcctaagcaccccattagatttacatttgtaaatatttttgctacagatattttttataattttcacttcagacatattttacaataaacataacttgatttactaatcacctttattccaacaatataccagttttatgacataaaaattcaagatatatagttaattctccaaaagcaaattctttagatgatctatcactttttttcttaatctataataagttctttctttaataaacatagcatcttgtatttcaataacactaaaattctttctatatttaagctcaatgtatttttgttcatccaatgtgagatttgttataatttgctctaagtatttattcttaaaatttatttctgctatttttccttttataccctcaatttcttgttcatgtttagtatctctaataatatttctgtattgattataatagctcaatttactattataggcttggacatttattttatcctcataatattcctttaaaacttgctcaacttttttgtcttctaatgattttctcattatatcccctcttcctttttttatctcatattccttttaatgtatgtaacttataataaatattataatcatattgtttattttatgcaacacattttaaaatttttttcattgctaatgttatttatgttaaaatttatatataaaataacttacggcaaggagacaaattatggataataagttatcaaaaataccaacggaaacttttggagaatacataaaaagaataagagagcttagaggctattcccaaagaaaactttcaaccttaagtgacttaagtaacacaacaatttgtagaatagaaaaaggttctgaaaatgggattgaaaacccagatgcagaaaccgttgttaaattagccgaaggtctaaagttagagaaaaaagcgcttttaattgcagcaggatatctggataatgaaaatgtagaggaaacaactgacttaaaagaatgtataagaattgccctgcaaaaattggggtggataaactcctacaatgatataaatgaagaaaccattacttacgtagaatttttgttaaaaaagtatggaaacaaatataaacaaattccttaaaacaacattaaggaatttgtttaattattactttatatttcttacatactctataactctcctctccctttcatttcccaaatctgaaagttcaatcaaactggaactcaattcagggttagtaactaaaatactttgtattatcctatcttccatgtagtcacattttaggataaaatttttaaaatctatccaattcaatttttctaaaagattgttcaaatttttatattcagaaaaacttctactatcctcaattctgtttgcaattttttcttctaaaataccaaaaatatattcttctacatactctcctttaaatactaactcttcaatgtaatctaccaaatttcctatttcattattgttaataacacctatagctttctgaatctcttctttactatttgaaaacaaaaaattaaatttttttttgacataatatcattcctttcttctgtattttccatacattttcataatatcatttacagcatcaatttatcgtcttttttatgacaattagcaatcacgtatatgacaaaaatacagttgttagtattataattcaactgtatttttagtgacttttatttagttataaaactgcccaataaataatttttatatatacactgattatcacaatatatttcaattcttcctatcatattattatttaaaattggactctttatatccttagatactattacctttttcgaataaatcttgttcttactgcacggaatatatatatcactaggtgctaaaagcttaacttttcctcccccgtttaaaacattgccgctgtaaactacatctccctttgataccattttcttgtattcataatttttcttaacatattcgtacattcgtttggtctctttccatctaggggtacaatttaatactacaaatataacatcatgaccattcatttttacagaactaactaaacactttcctgcattacctgtgtatcctgtttttactccgtcagcaccaggtatttgatataatattttgtttatattatgataacttcttgtaaaaccatattgtcctgaacccacatcctttgaacttacaatatcattaaaaaccttgttttcctttgcaacagaagttatgaaagcaagatcatatgctgtacaataatgtaaatctttatccaaaccatgcggtgtctgaaagtgactattaaacgctcctattttataagcatattcattcatcaaatcagcaaatttctccgtgttacctgctataccctctgcaatacaaatagctgcatcgttaccagaacgaagcattagtccgtataaaagctctcttaatgttatctcttcccctgccttgtatccaactttagatccccttatagaggctgcttttttagatatagtaaatttcttatctaagttcccatatttaattgccactaaagatgtcattattttagtggtacttgccattggaactatcatatctgcattcttttcatataatatcatcttggtgttgctatctatagctatagcacatctagcatttaagttaagcttatctgccttagcaaaagtagccggtgtaagaatacatacaattagtgccaaaactatacttctgtaaattttcatgcaaatcaccttacttcatttttatttcgtactcaattattttgtctatttttcaaattaaatattctcattattataaaaagcatatatgtggataaaatatataatattatccttatgtggaggtttattatgtacttgataattatagttataattgttttaataaccctaattcccattccaataaaagtatacctgctttattttgatgggaaatattcagttttcatttatggtaaaaaattaaaattcacagtaagaagaactgaaaaaaaaatcgaatataatttcaatacactaaaatacatttctaaacatagacataagtttcttaaatactcttcaaaaatcaaattaactattggacttggattagaggatgccgcacatactgcactttcattcggaatagtaaattctcttggtgctgctttttataatttattaaatgtattttttaatgtcagggattataactataaggtaattccattctttaaaaaaaacatattcaaaatcgaatttgaaagtatattttggataagtatagcaaaaactatatataacctatttattctaatttttgtattaatgaaattacgtatgaagatactaattagaaaaattaaaaataaaggaagtgttcactatggataataatccaattgaaaatttcatgagaaccactatggaaaatataaaaggaatgatagatgtaaataccatagtaggtgaacctataaaaaatactgatggtagtttaataattcctatttcaaaggtatcttttggtttcgcatcaggaggaagcgaatttaaaagccaagaagattcccaagaaaataaaaaaatctatccttttggcggaggtgcaggagcaggagtttctttaaaacctatagctttcttagtaataaaagatgattcagtaagattgctacctcttaatgcagaaaacacttacgaaaaagtagttgatatgataccacaacttatagaaatgtgtaagggattttcacacaaatcaaaaaaagaaaagtgctgtaatgatgataagaaaaaagattcaaattcaactaatggtaatacagataatgcaaatcaaaactctcaacagcaaagttagagtataaaaaataaaggttgagcctattctaagcttcaacctttattttcatattaagtaaatgcattaataaaagaatataaatattattccgtaccttcttttacctcttcatcaactgcaacttcatctaactcacttgcaatttgctccataggaggaagttcatctatattacccaaattaaagtttttcaaaaattcatctgttgtttcatacaatattggtcttcctggaacatctaatcttccacactcttgtatcagttttttttcttgaagagttaaaattgccctatcacttttaactcctctaatttcatccacatctattcttgttattggctgcttataagctatgattgcaagtgtttcaagagcagcttgagaaagtgcttgtctagtatttgtttttaacaattttctaacgtaatcactattttcatttttggtaactaattgatatgaatcattaatatttattaactttactcctctacagttatcattatatttaagcatcatgttattcaatacttcctgagctctctttgttgtgcattcaagtatagccgatatctgttttaacttaagaggttctccgcttacaaataataatgattctattattgactcatgaagttctttctttgaaatttcatccatttcaagctgactttcatttattttattcaactgcactcaccctctctatgtatatatctttaaagttatttgactggtatacctttatatccttaagctttataagctctaaaagtgctaaaaaagttacaactacttctattttatttgaacatttatttattatatttgaaaaatagatttctttatttgattttataatctcacttatctcatccattttatcttcaattttataaatatcaggagctattttatctggaagactattatttgtatttattctgcttctatacatttccataagcttctcaaatagcttgtacatatctaaaagtgtaatatctttgaggatatccttattatcagcatcctctgtcctatcatctattatttcaggtttttttgaaaatacttctccataatcgagctctctattctttaaaaaatctgctgccaatttgaattttttatactcaaccagtttcgaaaccagttccttagttggatcactttcttccttttcttcctcctcctcttttgttttagggagaagatatttagactttatttctattaaagtagcagccataactataaattcagaagttatttcaagatccatttccttcatttcatttaagtactgtatatactggttagttatatcgaatatctttatatcataaatatccattttgttttttcttattaaatgcagaagaagatcaaaaggcccttgaaaattatctatatttatgttcaatgtcatataaaatctctcccatattttttgttgaataatcaaaattcataagcatatttacattcctttttaaaatgccttcttttattaaccctactatttttccatctctttctattaaattctttatctcttttccacttattacagttttaaagttaagaatatttttcgtataattataaactttatatttcaattccttattccaagagaataaaacaagctcatattttgtcatgccattgaaaaccttatatatatcataatttctcttggagtttaaaagtttatgctccaattcttttcttcctactataaactttcttattgggttcaaaagttcctttttcagaaaagaattttccacaagagccctatttaatattttatccctagaacaatagaccatatttaaaaaattaatattctgctctgagaattgtatgctgtctcctaacatatcacaatctaaatctataattccatacatgcagcatttttttaacatttgaatccatttatcctcaccgcaaattaaatatagctcctttatgtatctttcgaaacttattgtattaaatatattatttccaataaggctattaaaaacaaagtcatcttcaatttcgaatccatatcttatgctgtatttaatggccctaaatattctagtacaatcctcactataggagtttttatgaatagattttataaccttattatttatatcatcaattccaccataaaaatctataattctctcatctacaatatcataagctaaagcattgacggtaaaatctcttctgtaaatatcatcttttatagatgaaggttcaacaattgggagcatgccatcttttaaatatgtctcttttctacatctgattaaatcaacactaactccattgttaaaatatatggttgaagtttgaaacttttcataataaacataatcctttaaagattttaattcctttattataattaacggatctccttcaacacacacatcaatgtccttgcttttcacatttaatatggaatctctaactgcaccgccaattatataagccttaatttttttttctttacatgccctttttatatcttttaaaacatttatttgaccttcattaaagattctatacatatccaataaaatgcatccctttacctataaaataaactgtaaagccattaaaacagttttacagtttattttatcataatctatattgaattatcaaatatacgttgcaaatcacttttgaaattttgaaaaaagcctcctaattttacatccctatcacaataaaccttgatttttcccgcatattttccatttacataatactcagcataacctatataggcacccttcttgatttccttatcttttttatctattttatataaacacctattggttatattacaattctctcctttaggaataacaacagataaatcatctactgcttttattaagaagtatttgtcaccttttttgtttaaagcaacctttttaacaacactatctttttcaacaacttttttagcagtaaattttgaaaaaccgtaattcataagcatagatgcatctctatttctaaccttataagttggagctcccattattattgcaagcatcctaacattatctttacaagcagtagcacttatacagtattttgcttcatcagtaaatcctgtttttaaaccatcacaacccttaaaaaatcttactaacttattgtgattaacaagagctataggcgtttttcttccttcacttatagtctccatgtaagttcctgtaaactttaaaatcttaggatgctttaatagttcacgtgacattagtgatatatcataagctgttgtcatatgaccatctgcatttaatccagtacaatttttaaagctagtatctttcattccaatttcctgagcttttttattcatcatgtttacaaagttttcctggctgccaccaagatattctgccattgcaactgcagcatcatttccagaagctatagctattccctttagcagctcttctacagttctaacttctcctgtatctaaaagcatagagcttccacccattttctttgcgttctcacttaccgtaaccttatctgtaagctttatttttccactatctacagcctccatagtcaataacatagtcattatttttgttactgatgctggtgcaaacttttcatgagaatttttttcataaataattgctcctgttgatggttccaataatattgcagattttgcttccacattaataccagaagtgtcatttggaaccttactctctttgtcattattaggcccaaaagcctttacgctaaatggtaaaaacaaagactgaagaaataataatagtagagccattgcccctatcgcgattcccctttttttcatttatgtatcatcctttctaacaatatcaattttataaatttatttttaccacattgttagaaattatcacataaatgaattaattttttctaccattttttgctatatattctttatatatctcctactattgccgttacaagctttgtaaacttatctttaaccatattagaagtcttaattacctctttatggtcaagaggtttattaagtataccagcagccatattagttatgcaggagattcctattaccttcataccacagtgatttgctgctataacctctggaactgtagacattcctacagcatctcctcctaacactctaaccatctttatttctgcaggtgtttcataattaggacctgacatcataaaataagttcctgagactacgtctataccaatacttgaagctattttttttgctttttctatcatattcatatcataggcattggacatatctggaaatctcgggcccatttcatcgcaattttttcctattaatggatttatacttgaaaaatttatgtgatcatttataatcattaaatcacctggtttaaattctgtgtttactccacctgctgcgtttgtaactataagcttctttaccccaatgcttttcattatgtaaataggcagtgccaaagtttcagctttatttccttcgtaatagtgaaatcttccctgcatcataacaacattaattccattaagcttaccaaatacaaattgtcctgcatgccctttcactgttgatgatggcaaatttggcacatcactgtagcttataatatttttttcgctaaccttatctgcaagatctcctaatccagaacctaatattatacctatttcaggagttttatctattctttctttgatatagctagaactttcttctacaacctttatattcaaagcaatctctctcctttacttcataattatgtctttaaagctttttcctactaaattattttcaacctgtaacaagtcaagtatagttttacctatatctgaaaaactatctctaatttttatatccgctccaccctttatatcttttccgtaggctataaaaggtatatactccctagagtgatctgtactttctgttgttggatcgcagccatgatctgcagttatcatcagaacatcataatctttcatatttgtttttatttcattaattcttccgtcaaattcctcaagagcttttgcataccctttaggatcatttctatggccatatagcatatcaaaatctactaaatttgtaaatattaatccttttttatctgttttcatatattctagtgttttatctacaccatccatattattttttatatgcactgcttccgtaacgccctttttgttaaatatatcttcaatttttccaacacacataacatttgatttattttcctttatgtactcaagcatggtcttattaaatgggtccaatgcaaaatctcttctatttgaagttctagtatagttactattcttccctacaaatggtcttgctataactctaccaacagttctatcatcaacaagcatttcccttgccactttacatattttataaagctcatcaagtggtattatttcttcatgtgctgcaacttgaaaaacgctgtcagcagatgtatatactataggacatccagtcttaatatgttcgtctcctaattcttttattatttctgtacctgaagcaaccttatttcctattactttcctgcctatctttttttcaaactcatctattatgtcttttggaaaaccatttggataagtattcaaaggctcttctaatataactcctgacatttcccaatgccctgttactgtatcctttcctttagacatctcttttaattttccaaaggctcctataggatactgtactttgtctacccctttgattccacttatgtttccaagtcccatttttaccatgtctggtaactttaatccacctacagctttagatatatttcctattgtgtcgctccctttatcaccatatttatctgcatcaggcatttcaccagccccaacactatctaaaactatgagtataactctttcaaccatattatttcctccctttatgaatttctccactgtccaattgtttaatttaaaatcctaagcattttcttaagctctaggatgagttttcttgtaaacttcagctattcttgtctttctatacataccagaataaatttgagtagtagccatatcactatgtcctaaaagctcttgtatagtctttatatccgctccattttgaagtaaatgaaccgcaaatgaatgccttaaagtatatgcattaatcttcttttttataccagattcttgtgcatactgcttaattatcttccaaaaaccttgacgagtcattttatcaccttgtagattaaaaaaaagataatcaatattttgaacatttaactttgttcttacctttaaatatatttcaagacacttaactgcatatgaccccattggaattattctttccttattttttataccgcgacattttatgtaagatagttttaaatttatatcatatatagttaaattcaacagttccgtaaccttcattcctgttgcatacattatttctagcattgctttatcccttatacccttatcagtatttccatcaggacccattagcaatttttcaacctcttctattgtaagaatatcaggaaaattccttcttatctttggcatctcatattgtgttacaggattatcatccattatgccttttatctccaagtatttgaaaaaatttcttatggatactatatttcttacaatagaactattagcccgtccatttttttgcaaatactgcacatacgacattatcgtaataacatcaacctctcgaagcttttcacctttttcatctaaaaattcatgaaatttctttatatcacgtctatatgcatctattgtatttaaactaagatttttctttcttatttcagcaaagtattgttcaattaaattatccattacaatatctcccactttttttagttgtaaccttcacaaattctaaaaaaaaatatatattttaatactaattgcttactataactaaatatattgtttacaaaatatattccattactagtgttatttttctgaacaatataagttaatatttgatctataagcctcggaatcaaaattccaaagattattataataaaaaaacatttaagaaaagttattataaaattagtcatatctttccgcattaaaaaatacttctcccaagttgcattgctgtaagtttaattatatttggtgtacaatatgtctcaaataaaaatcccatacccataaatatagctgcaaatgcaaaaactaatgaatatgaacctatcctagtaaaaattctgtttcttattccatcgttaaatccgcacctcacaagacctatagaaaattccatagcaataactgatacgaataaaatacatggtatgtaaattaaattttgaggcaaaactcctaaaaatgccattgtaactcccttgataccaagattatttacaaagaatgttattgtaaaaccaagggaaaaacctttcaagagatcaataatcaaaattacaggtattcctatcattgtaagtcctaaaaaccatatgattattataagtggtatattatcttttaaggtttgaaataaaactccattataatttatagaaacagtacccttattttttgtaaaatttaaaatgtagctcattaaatcgttcttttcatagctactcatatactttacggtatatacgcttattacaaaacctatccctatacttaaagaacttataatatacagccaaaatctttccttaatatgattacttattgcttcagttacactaaacttcacagcaactcaccctttctttccatcactttaataaataatatgatatatagaaaaggtttatgcaaagttttatttaaaattcatcttaccttataagcatataaataaagtttactattgaatcttgcatttgtaaatgcgcattacctaacttttagtctatagaaattatttaatttttatttttttcacaagaatttctttcattttcttttatttctctttgtagttcatcagctttacccgctgctttaatacaaccaataattccgaggaaaataactgctacaaaaatagttgctatcacaattaaaattctaattatcataatatattcaccaaccatcactttatataatgaaccatatccttctcactatatattctccaatcttccaatttataatcatattggcggaaaaaacaaaaacaaaccaaggttactattccttggttatcattaaagaaaaatgtcaccctgaaaatccattgaaattctaccacatactttattttataattgaagtatattattgtactatgtatttgtcaacaatcaattttcttaagtatttctataaaaaataaactttctccattcaatttaacaatgaagaaagtttatcgatattctttttaaaatttgtacaatgtattgattattaaaagctaacataaaaaattaacttttaccaatgtattaatacatttaacttagctaactttatttttaagtcttagcttgtcagcaatcatagcaataaattcactattagtaggtttacctttgccattgttgatagtatatccaaataacttatttatagtttcaacctgtccacgtgaccatgcaacttcaatagcatgtcttattgctctttctactctgctagctgtagtattgtatttttttgcaatagaaggatataattccttagtaactgctgataaaagctccatattattaactaccattgttatagcttcccttaaatacatataaccttttatatgtgctggaacacctatttgatgtattattgatgtaatttcgctttctaaatcaaccgctttattacctatattatcagagtaaacatcatttgcaattgtacctgcaaagcttgcctctttctcttcaacttgatatgaccttttctgctctgaatttgatatagtattattaaacatttctcttattctattagtgaatacatccatatcaaaaggtttaactacatagtagtccgcccctaatgttatagctctttgtgttattttatcctgtccaacagcggataaaactattattcttggaaggttttctgcatctttattgttaagtttttctaatactcctagtccatctaatcttggcattattatatcgagaacaacaaggtcaggctttttattctctataagctttaaagcttccactccatcctttgctattccaacaactatcatatcgctttggttaagcaagtaatcattaagaatattacaaaattccttattatcatctgcaattaaaacacttatttttctactttccatttttaactcccctttataaaatatagaaattttaccataaattatcattttgtatattttatattcgacaaaactattatttatccttctcctatatataataacatatgtatagttttataattctatatttttcatatctaattaattttgtctttatcttcttttccattttattactaaaatgataaaaaatcaagagaatatatctttttttataaaatatttaattctctgctttcaaaacaaaaacatatataggaaaccatatatgtctcaaatcattatatacagcccatgtgctataattagcttatactggttttcctatatatagggttatacttaataaactcaatttttataatatacctgcacttttaagcatccattcaatataaactccatatcctgtatcaggcttatttattaaaacatgtgttactgctccaacaactttattattttgtattattggacttccactcattccttgaactatcccacctgttttatctagaagttccgcatctgtaactttaatcatcatacttttaggatttggagaactttgatcaaacaacttttctatatttatagcatacattttaggctgacttccatcaatggttgttaaaatttttgcgggccctaatttcacctcatttctcattgcaacttccataggtttattatattgtaaaccttcaaatttttcatatccttttccaaacaaaccacatatggtgttatttttcacaattccaattggcttattttcatttatgaatatacctctcagctcaccagggttacctctaatgcctttatttacagaaactatagatgaatctattaagcttcctctactgatatttattatatcacctgtatccacatctgtaataggatgacctagagccccaaaaactttagttttatcagaataaaaagttaatgttccaattcccgctgtagaatctcttacccaaagtcctattttataattttcgtcactcttgcattttactttacttattaccttttctattattttaccttttctctctactgttaactttaccttttctgtagaatctttgttaactttttcacccaattcgtcggcagtatttattgcctcttcatttactttaactatactatcacctatctgtattcctgaattagctgctggactttgcactctacctcgagatgcatctatatcactaaatccaacaatcaaaacaccttttgtgtgtaatttaattcctataggctgtcctccaggataaacctctatttttgcctggggcttaatgctagcagattttactgaggatattccaaacattccctcgttagctttactttttttcttggaagttgtattttttaaatcaaattttgatgtaactaatctattttgactgcgttttataaaaacactctgcggtgtacttataaccttattatacgctaaaaatacaaccaaaattacaggagttaaaatgtagtatacaatatttatttttttatttttcacgattttacctccttacatttatgcttttgtatcttccacaacattaaatttcccattttaaaatttaattatgctatcatatagatgtatttatagttaatactttagaaattatcctaaaaaataaaaattgaaagaatacatgttttctttcataaaagccaacatatatacagttatcataattaacattatctatgataactgtatatatgttggctaactctagaaacacttttattctttcaattcatctaaacacaaaatttgtaatttatttatacttcctaacttattctctttcctacaatttcactttttcttttttgagcaattaatatcatttccttagcatgatccatagttattttagtaacttcacttccacctatcatcattgcaagtgcatttgctttaccctctttatcaagcggccttacatctgtataagttttatcattctttatgttctttgaaaccatgaattgcgtatctgacatacaagctatttgtgggagatgtgtaacacaaaatacttgatgattctctgaaacagcatacattttatctgctaccctctcagctatcctgccgcttattcctgtatcaatctcatcaaatataacagaaggtattttatctttatttacaaaaacagtcttcattgacaacattattctcgaaagttctcctcctgatacaattttctccaaaggcctcaaaggttctcctatattagtagatattaaaaattgaaccttatcacttccactttcactaatatacctttcattgaaatctacttctatactaaaagtacttttaccaagtcccacataatctaattgatccttaacagacttttcaagtttcttggcaaaatcacaccttattttatgtatattttttgctttatggagtaatttctcatatacgctctttctttttccctctaattcctttactatctcttcgctatttactatttcattatattgagtgttaagcttatctctgtaattcaatatatcctgtattgtgcttccatattttttcttataactatctatagtgaacagtctactatttatataatccaactcaccagcatcaaaacttataccgcttttaattgcttttatttcctctacaacttcacctaaattatagtagctatcttcaagtatctttactatatcagaaatcttatcattattattttcaatacttttaattttattcacaacataaccaattaaatcataagctgacttagaattatcacttccatcataaagaacctcacatgcctcagaaaatacctttgacaatgcttcactgttagaaacaattgaatacctctcttgaagttcattatcttctccaatttttaatttagagttatctatttcgtttatttgatattttaaaaaatcagctagcttcccattttcaccatttttgcctttcaaatcacgtatcttttcatctatagcttttaaactttcatatgtaattgtatagtctttttttgcactaattaagctttcttcacaataatcatctaaatacataatatgctttaatgggtccaacaaattttggttctcatgctgtccatgtatgtcgattaatgtttcacttacgttttttagcactgacactaacacagattttccattaattttggcaatacttttacccgacttaaatgtttctctactcactattacacaatcctcatattctatatccatgttttcgagttctgcctttgttttatcattttctattgtaaaaatagcttcaacatatgttctcttttctccagttcgtataaaacctctacttgacttacctccaagaacatagtttattgcatcaattaatattgatttaccagcacctgtttcaccaaataaaacattgaatcctttttcaaaattaatagttatatcttctataagagcaaaatttttaatattgagttgaagaagcataaaaccctctcctattcattaatcatctttttcagcttttgaacaatattgaatgctgtttcttcacttctagaaagtataaaaatagtgttatcgcctgctattgaacctgctattccatctaaattcaaagagtctatagcttccgctgctgcattagctgaacccgatatggtttttaccactaccatattatttaccctgtcaacatttaatacagtttgggcaaaaattgtaacgagcttatttgacaaaaaactctccgtaggagaaatagttgcatatttatatcttccttttgatgagagaacttttataagtttaagctcctttatatctcttgatacagtggcttgagtaacttccataccacttcttcttaattcctcagccagctcctcttgagtttcaatatcctttaaatttataatttctaaaatttttgtatgtcttgataccttcaatatttatcaccttcacattcttcagttctaagtattattttctttctaagtacttcaaaataattataatccttcaattttagaagtttacatttatagttaagcttcgaaatctcaataaatgaaactccttttacgtctacaggttgccttccatctacagttataaatacgttctcatttgcatctattcctgatattgttatattacttttaccatccaatactatggtacctgcatatggtccttgaggacaaattggagtaagtgatattaaatccaggttaggataaattattggacctcctgctgataaattgtacgctgtagagccggttggagtagatataattatcccatccgacttaaatcccatataaaacttatcgtcaacatctatattatattttagtatttttgccatatttcccttgtacaaaacaacttcatttaaagaatagaaaacttttttgctgtttccctttataaaagaacatttaagcatagttctttcttgaaaaaaatattcacccttaaatattttatgtattgcatctttgaaatccttaaactcaatagatgataaaaatccaaggtgacctatattaacactgaatataggaattccacatgatactaaattccttgcagcgtttaaaatagtgccatctcctccaaacgcaataaagaaatctggttttgttttacatacttcgtcaaaataatttaattcatcataaaattttacttgaacgtcctttttttcttcttttatgactttttccacatattttcttattgtaccatcaggatctttacatgaattgatattgacacctatattcttcatttaaatctctcctaatcaagcttcttatgggcattttcaaccacactttctgtactatcataatctacctgtatacactttttagaaaagtatactagatattctatgttaccctctggtcccttaattggcgaatatgtaattcctaatattgacaacttcatttctttcaaaaaatccactatcgtatttattacttcaatatgagtttcaggttcccttacaactcctctttttccaactttttctcttcctgcctcaaactgaggttttataagtgctacaatctccccatcatcttttagcaaattaataactacaggaattactttctttaaagatataaaagaaacatcaatactggcaaaattaccaaattcgcctatatcttcaggagtaacatatctcacgttagttctttccatacatacaactcttggatctgttcttaacttccaagcaaattgaccgtatccaacatctatagcaaaaactttggatgcaccattctgaagcatacaatctgtaaatccaccagtagatgctcctatatcaaaacagactttatcctttaatcctaaaccaaaggattttatcgccctttcaagcttgtatccacccctgcttacataaggcatcttttctcctctaaattcaaccttagaggagacctttaccttttgaccacatttatcaattcttaagtcatctacatatatttctccagccattatacttgctcttgctttttctctggattcaaatattcctttttccaccaaaagcacgtctaatctttctttgttttcagacatataaacttctctcctaaaataaaactatatgactaattatttaaaagaaattattcttttgcatatgccttctatatcaagatcatatagtttatataaaatttcgatatttccatgagttatgaactcatctttaaagcctaaatttaaaacatcatttttaaatttcatatcatttagatgttcgagtattaagctcccaatccctccatgaaggacattatcttcaataaccacaaatttatagttatctcttgcaaatctattcaaggtatccttatctattggctttataaaagttgcatttataatagcacaatcgattccatatttcaaaagttcatctctaactaccatagccctttgaaccatttttcctactgctacaatagctacatcttttccatcttttaatatctcccattttccgtgtctaaattcctttaaaggtgccaaaacatctgaaatatcatttccacccttagggtatcttactgcaatgggataattttgcttaactgcccaattcataatataattcaattcttcaacacactttggagccattatagtcatattaggtatactacttaaatatgaaatatcaaaaactccctgatgagtctctccatcttcaccaacaatacctgctctatctattgcaaacactactggtaatttctgaatgcaaacatcgtgaagcacttgatcatatgctctttgaagaaatgtcgaatacactgcaaagactggcttatatcctgtagctgctaatcccgctgccatagtaactgcgtgctgctcagatataccaacatcaaaaaacctttgtggaaacttcttagaaaattcacacaatccagttccatcagtcattgctgcagtaatcgctacaattttatcattattctcagccatttgaaccattgccttaccaaaggctttagaatatgtatcctttggctttgaaagtgcttctcctgttttagaattaaatttgcctatactatgaaatttattaggattttcttctgcatagctatagccttttcccttttgagtcttaacatgtaatatcacaggtcctttaatttccttagcttttgatataacactagttagttcttcaatattatgtccatcaattggaccaagatattttattcctatatcttcaaaaaacattcctgatacaaccatttgctttattccacctttgattctttcgatggaattagctacctctgaccctatattagttctttgtaatttagttttaacatccttctttaatttgttgtatttaggatctaatcttattttatttaagtacttagatatgcttccaacattttttgcgatagacatttgattgtcattaagtattattataacattagttttcttgtatccaatatcatttaaagcttcaagtgccataccacctgtaagtgcaccgtcacctataactgcaataacatcataattatcttttgacagatcccttgctcttgcaatacccgaagctgctgaaatagatgtgctactatgacctgtttcaaatgcatcataaatactttcattcctctttggaaagccacttagtccattaaactgcttaagactatcaaatttatccttgcgacctgttaagattttatgtacataggcttgatgtcctacatcccatattattttatcttttttcaaattgaatactttgtgcaagcttaaggtaagctccactacgccaagattagaggcaagatgacctcctgtttttgaaatcttatctatcaaaaacttccttatctcactagcaaattctttaagctcatcactgctcatattttttatatcatctacatcttcataattatcaagtatgttatacattttttcatctatccttttgaaccaggtataaaatttttgataccctggtaactatttttctgctattattaataccataagtttttcctatagcctttcctaaaatagttccagctgctatcattcctccaaccattgcacttaaagcttcagatggaatatttttattaagcatttgctgaagcaatttatctgttatcaaagctcccatagtaccacttacaattccgcatatatctcctattacatcattgcaaaatgtagcaaccttatctgaatttcttataagttttattgcaatggatgaaccatgaatttttttagctgccatagcatgaaagggagtttctactgctgtagctacagaaattccaattatatcaaaaactattcctataaaaattatacaaatcaataaaataaaagctactaataaattaacccttcttagtagcaaatcagacaacagagaaacactgctactaatggtaatagaccatataaaaatcttaagcagccatttgtgcatatctctagaattaccttttttattttttgacacaataattcctccaaaacataacatcaatgtggtaacaaaataagtaaatcttacggcataggttcagtaggctttccccacgaataactatacgtcgccatatagcggtttccctttaatatccgagctgaagtgttgccactttcaggactgaattgccactaagtccgcactgcaatcctcattttaccaaaacagtctaggagttttcctcaacagttagatgctttcttagcctcttttgcaacataggtttcagagttcaatagtacaaaaacttaggcctaaaatttttgacttgtttatctcctctccccataccactcaaggcaggctacactgcacatagcttttacaccacattgcaggtttaccccaatttcgtatattgaatatctctctcaatatacaataattggcctccacaaaagtagggtcatttgtcgcatgccattgcgagtgccccagcttttttaactcccagcacaagcccaagactgggcattctaaggccagcaccaggaacttcatcgatgtgccctttagcggatttttagccccgccttcaaaaagcatttccctgactagaatactgcaccacattgaatatattaattgaaattataacatataagctttaaatattcaaaaaataaaagcgttcctatatacaattaaacttatctatttctctttaataaaagttctgttatttctttaagcaattccgtattgccttgtattttgcctattatatctaaacattcatctgttaactctctgcaaatactcttacacttatctattccatacaaagtaacataggtacatttatcattttccaaatcacttttcgatgtctttcccatgatttttgtatctccaataatatcgagtatatcatcttctatttgaaaagcaagacctaatttatcaccatattgcgataaaagctccacatcatgcaaaggagctccccctaatattgctccactgactacagctgcctttataagctcacctgtcttttttttgtgcatatatctaagctcatcttcatttatcttctttccttcacttaatatatccacaacttgaccgcctatcattccatctgaacttgctgccttagatatcattaaacaagctttaagagcctcttcaccttttccaatacaatacttaaacattatgttcattgcctcgttcagaaggccgtcacctgctaaaagagcaatagaatagccaaaaatcttatgatttgttggtcttcctcttcttaaatcatcattatccatacacggtaaatcatcatgtattagtgaataagtatgtatcatttcaattgctgccgctatgtcaattacttctttgtaatctttattatatatggcatacgaagctaataaaagcagaggtcttaccctttttccacccgcatttaggctatagttcatagattcatatacccttttattgtagttatcttttccttcaaagtatctacttaaatattcctctacttctttctttattactttattgttcatatgaatcacctgcttttttaaattcctcttctccattttccgtaagcagttttatctttccctccgctttgtttaatattttatacagcttatcacaaagctttacaccatcctcataatttttcatagcttcctctaaaggtaactcttcattttccatactgctcacaattttttcaagttcttttatcattgattcataactttcttttttagaaggcattaattattcacctcacttaaattctagttcaccttaaaatatctattttagcattcaccttgccatccttaaatgttatatggactttatctggttcttttaatttatctacattacttatattatttccaatttcatcacttataatggaatatcctttatttaaaatattaattgggctatttgattttaaaatagaattatatcttagtatcttttctttttctatttttatcttatttgctattctcatatcaagtacatacttaaagttgtcaattgaagaatatccattaactatcaatatttctggactgtttttttctaacatccttttagctatttcaagctgattacatttattttgaatatatgttttaatactagtatcaagagctctttttagagaaacaaaactattcatttcttcatttatatttgggactgcaatttctgccgctgccgaaggagtaggtgctcttctatcacttacaaaatcaactattgtgaagtctgtttcatgacctacacctgttacaacaggctttttagaattatatacagcatatgcaagcttttcatcgttaaatgcccaaagttcctcaatggatcctccaccacgtgccaatattatagtatcaatgtcttctctattatttaaataatccaaagcttttattaattcacctggggcatttaccccttgaactaaagttggacatatgatcatgtctacactcttatttcttctcgtagccacatttattatatctcttatggctgcacctgttggagaggttataacacctatcattttaggatatttaggtatatttcgcttatgttcctcactaaacataccctcgtttaaaagcttttcctttagtttctcaaaggcttcataaagttctcctcttccctcaggagtgatttcagtacagtaaagctgataagctccatctttaacatatactgatactcttccctttacatttaccttcattccattttcaggaataaattttaacttttcagcattacttctaaacattatgcagtttatcttccctccttcatccttaagggaaaaataaacatgcccactgctgtgaaatttaaaatttgatatttcgccttttacttgagcattactcaatatataatcactatctacaactctttttatataattatttagttctgaaaccgacaaaacctttatatacatattatttcaatgcctcacaaacatttaatattaacattgtggttgtcatcgcccctactcccccaggaactggagttacgtaagctgccttttttataacctcatcaaaaaccacatctccacgaagtttaccatctactactgtagttccaacatcaattacaatagatttttcattaacaaattcatctgttataaaacctggtcttccaatagcacttacaataatatcagcttttttacatatatcttttaagttttgtgttctagagtggcatattgtaaccgttgcattttcatttagtaaaagctgcgctgtaggtttacctacaatgttacttctccctattacaactgcatttttcccacaaatatccacatttaaactctttataagatttataatacttcttggcgtgcatggtataaatgatttttcacccttgtaaaattttcctgtatttatatctgtaagactatctatatctttattagcatctattttagatgtgactagttttgcatcaatgtgattaggcagcggtaattgaagcataattccatgaattttattatctacgtttagaccttcaattaactttattagttcttcctctcgtatactttcatctaaaaatatactcttaaactcaattccaagactttctgatacttttttttgattgttaacatagtataatgagcccccatcatctccaactgttatactggctatgcatggaatatctaacccctgtttctttctttcattaataaattcaattattttatctttatacttttgagattccgcttttccattaattatatctcccatacacaactactctcctttaaattatcatttttcctcagaactatttattaaatttccaataactccattaacaaatgagaaagagttctcttcagcataactttttgcaagttcaacagcctcatttgcagaaaccttacaaggtatatccttttcgaagaatatttcatatgctgccatcctaagtatggtgatatttatcttggatattctgcttatcttccacttcttggagctttcttcaattttagaatctatgtactccatgttttcatctattcctcgtagtattctctctatgtactcaaaatctaagttctctatttcgttattttctttataatgttctattgtatctgaaatgctatttttgttaatagatatttcaaacaataatttcatagctacttctctacttttctttctattcatttaattcttttcctcctagtatgtatatgttaggttttaatccatcctatacacaatattatgtcctttaatacatggtttttactctatatttatatgcaattaaaacaccctcttaagagggtgttttattaattatcttcttctatttcttccgtttcctgctgtttattagaaaaagccacattttgaacaaaaacatttactgctgaaacattgagtccagttaaactctcaacagttgttttaacattctcttgaaccttaactgcaacatctggtattcttaagccatattctattacaacataaaggtctatggaagcgctttcttctcctacatttactttaacacccttagttaaattcttcttaccgctaagtatcttagttattccaccaactattcctgagctcataccaactacacccttaatctcggatgcggcaagtcctgcaataacacaaaccacttcatcggatattttaactatacccatgtctatattcttaagttcctctgccattttttattacctcctctgctctgaaaaaacaaagcaatttacatataatcaaaattaaaggctataccaataattaaaacactcattctttaagctaagagtattatatcaaaataatttatattttacaaatacacatatttaaaattactaagtttaatttatactcaaaacagagctctagtaaaaaagatagggtttcatatgtaaagtgaaacctataaatctaaaacatagtatttataagttaactattacccctgaaaccctatcttttaatgtactggttgtaaaacttctatgttcctaatcttagttacatccgtaactacttccttaatatctctaagttgattatccgttaatttatcactatcgcattttactgttacagttactttactatcagttatggaacaaagtgcgtccttaaagcctttacttttaagcattgtttcaaccttattacacttagaatcctcatctgttaatgtcatcattttttgttgagctgatgattttgtatcattggaaacattcttatcatcaattatgttctttaaagtttgtatctccctttgatctttttgttccctttcaagccttccctgtgcaaatacatctgtctttgtgctgctacttttcttagaattgtcatttgtagataccgtactcttattagtgttagtatcactatcaaagtcagtatcatttacataaagtggacttcttacccttgttgccagcactccagcacacactataagtaccatcaaagtaacaataataacagcttgttttttattcatatatttcttatcctccttttattattcattctaaaaaatttatatgcttgtttactgttttctatgaataatttattttttcataggatacacatttaccttatcctccgttagctgaaacaaatctactacagcattcacaatattaagctttattacagaattatctgctccttctgccacaacacaaacccctgttatttgaggcttatattccttcaatataaatggtgattctttatctccatcctttgatgtaacaattgtacttccatcagaatcctgagtggttgttcttttccctccagaattatctgcttcatctgtaacagatttagtcttgttttcattagttgctggcacctgctcttctccacttccaaagtaaatcattacctgaaccttacccactccatctatttgttctaatgtttgttttaatttttcctccatattagtttcatagtcctttgaaggcttgacttcatttttggttccatcattttcagctttggtattctttacattattctcagtaatactaccagtaatactattattagaactattcttaaaaaaatctgcagtaataataagtagtattccaataagtcctaatataactatattagtaactgtactcttcttagttttttcatccttagaatcgaatttaagattacttaaaaacttcttaaaattcatcttatcaccccatcagagtttataaatttttatatcagaataaggtatttccatctcatcacttatgtagttagctatttccttcttagttttttcatcaatatcactttctgtattctctttatcattatctatttgtactttttcaatttttttcacgttgttatttttaacacctatatttaacttttttattaagacagttttcttctcgctgctatattgaacatctgcagtcacactataatcattatccggatacttgtttttaagcatttttgaacacttatcctctaaatttttcttaaattcatcgacaatagaatttatttcttctccatcgcttccttttaattcttgatcataagtatttttctcaaaaacattttgagcattaacaatatacttatttatgttatctgcattgttaaaaacctttattacaggctgtacgattacagtcattaaaataagtcctagtacaaatttagagtattttttcagcttattatctggaagtattatttctataaccgtaataaataatgcagcagtacatatagttataacccattgtttaagccattcaagcatatagttcaccaatccttatcttaaactatttttccagctgctattattatagctatcattataaaaaacattacagctacccctataagacaagatccaattaatataagacaatctcctacactattcaaacaattaactattctcttatcgcttataggttctacaaaggcagctacaattttatgcacaaaggcaagtaaaaatattttgattacaggaaaaataatcatcactattaaaacaattagccctacagtgcctattgcatttttaagtagtattgaataccccgcaaccgttgaaatagcatcagaaaggcattttccaactattggtacaaagttgtccacagcaaattttgcagtttttgcagttacattgtctatagcctttgcatttattcctcttatagttattattcctataaatacagtcataattatgccttgaatccatattacagatctttttaggagtttcgataaattgctaattttataatcctctgataagttatttacgaactcaagcacaaatgataataaaatcaatggaattaatatatcagtaaaaactttttcagtaaaatttatagagaacaatataacaggatcaaatactgtagattctacaagactcccagaacttatgagaagtgtaagcaaaatcggaacaacagctcccatcatattgcttatatctttcatagccccttgtgctgtacttacacatattttaaagtttttagcaattattattattattattgcataacatgaaaaatatgctatttgagttaacttttcagaagaaaaagccttttgaagattagttaaaagagcacaaacaatacatatgaaaaccagtgtagatactagttttaagcagcttgttatatcctgcataaagtaactaaaaacagctctgctaaatttagaaacagaagtattacctttaccatttttcatatagtattcaacataatcttttatattaagatccttcagcacatcatactttccctttatttttgtcatataatcataaagttgcataatttgttgctcattttcttttgttacatcagaaccacttttatcatatgcttgtacagttacaggaaacaagataagaataactacaaacatcaatattacttttttcattttcttctcctatatgatatttaaaatagcatttaaaacccccatgagtattggaactgctaacatgagaataagtatcttacctgaaaactctaccctagaggctatgctattttgccctgcatccttgcatatttcactgcaaaaggatgctatatatgcaataccaagtatttttaatacagtcgtcaagtatacaaaatcaacctttgccttaagagcaaattgctgcagaatctgcataacagctgttatcctaggtatcataaaaataaatataagaatcccagcaatcatacttacactaacagctatatcatctctttttcctttaaagactaatgtaactgctaaagctacaaatgcaaaagctactacttttattatttccataatatcctcctaaagttgaaacatagtctttacagcctcaaacaatttacttattaggcttattaccatcaagaggaggatcactatgcctgccaaatttgttactactgcaaaatcatcttttccactggatttaagtattttatctataattatagtaagaattccaactcccgcaattttaaataaaagcgatatatcaagcaaaaggtcaccccctaaacaatcatgatagtaatcattgcacctacacaaaatccaagacatctgtacatcttaacgttttttttcattatttcctccgcttccgttatatgattttcaatattcttaatagcaagttcaaataccttaacttgtccttcaatatctgtttctcctaggctctttgacaaatttagaagtatcttcttatcatcattgtttaaattagtttgaaacttatctgtatcaaaaacgcacttaaatgcgctatatacattatcagtttctttataacagagattttccgcagctaatttaaagaataaattcactggatagtttgatctatctgatatgttcttaaaagcttcaacaagcggtgtatgtgtgtatataatttcatttctaagttcatacagagaattatgaatttctttaagctccttcactctctttctaaaatgttctgcatacctaaaacctactatggtagaagaagttattattaggatacaccctacaaattttatcaccctataaacccctttctctttcttttgtataaaaatcgtaaatatactctacagtcccaacaccacttctgccacttaatactattgctctttcaaaaacattattcttaatggcatctttaaaaacatctctactatttaaatcttcaattccaaatccatgtatggtggttataagcttaacaccgcagtttactgccgtaagtatactcttaatatcatcataagtgcctatttcatcacaaattataacctctggagccatactccttattgccatcataattccaatacttttagggcaattatccaaaatatccgtccttattcctatatccatttgatttacaccattaagacatgcacctatctcacttctctcatctataacacatacctttttccctctaaattgtatgctgtttataccataggatatgttccttgttatatctcttaaaagtgttgtttttccacaattaggtggagatattataatagtattgagtacggtatttccataaacaatttttttcattatgctatttgaacatccagttacttctttacatattcttatatttaatgaggatatattctttatagtttttattttattttcttctaatacacaatctccacatataccaactctatggcctccttttatggtaatatatccttgtcttaattcatcttctactgaatatattgagtatccactcatgacattaaaggtttttttcaaatcttcttttgtggcaatgtagttacttattatctcctttttcccaatttgaattattaaaggcttgtttacttttattcgtatctcttgtaagttattatagtcggatattcttttaacttctctttctattttttcaggtagtatagaaaagatatcttcaaggttcatcacatttcctccccttataaagagtttaaagttagttttcacatactaagccctacaattaattagtatttagtaatgctaaaaattattacaaaaaaaacagaggtttaacataattaattacgttaaacctctgtttttataatacttcaaactaagaaattctataaattcaattttattgaactctttccatatattctccagttcttgtatcaactcttattgtttctccctcattaacaaacaaaggaacttgaactactgcatttgtttcaagagtagcgggcttcataacatttgatgttgtatttccttttactcctggttcgcaggaaactattttaagttctacaaagtttggagcttctactgagaaagcctcccctttgtaaaatttaattgtagcaaacatattttcttttaaatacttgattgcattttcaacttgatcaaaacttaaaggaatttgttcataagtttcttgatccataaaatagtagaaagactcatcagaatataaatattgcatttcttttctttctattactgcttcctgcattttcgctgttggattaaatgttgtttctgttacagcaccagttataacgttcttaagctttgttcttacaaaagctgctccctttcctggttttacgtgtaaaaaatcaactacattataaacttgtccatccagctcaaaagtagttccctttcttaaatctcctgctgatatcatttaagtatccctccaaaacattaatcaatatataatattataaccttttaggtaaaattaatacacattaatacaaaataactatagacatatcaattccttaggtgattctgataaacatacacacccatcatctttaacaactattaaatcctctattctaactcctccaaaaccaggaatgtatattccaggttcatccgttactatcataccagactttagaactgtttcagatgcaggactaactctaggcccctcatgtatttgtcttccaacaccatgacctaatccatgtccaaaattttctccataaccatgagaagctattatatctctagcaactttatctacttctcttcctgtaactccactctttataacttttaaggcttctttgttagctttaagaactacatcatagatttctttcattttgtcatttggttttcctataactattgttcttgtcatatccgagcaataatcattaaagacacaaccaaaatccatagttaaaaactcgccttctttaagaatcttatctgtagcctgaccatgaggcaaacatgatctttctccactggctattatagatggaaaagataaatccttagctccaagttttttcattgtaaattcaagttctaatccaacttctctttctgtcataccttttttaataaatttaagcatatgactaaaagccttatccgctatagctgctgctttttttatagtatcaacttcattttcatctttaatcattcttaactcttcaaccataccacctaatggtacaagttctgctttaacactttttttataagaatcatatatggaaactgatatgatgtcctcttcaaagcctagcttacttatgtttagcttttctaccatattccctaaaaaagatgagaatggaccactatactgtacaacctcgtaattttcgtttacctgctgctttgcctgctctgtaaaccttgaatcagttataaaaattgctttatctaaggttattatagagaaactttcgtctcccgtaaaaccgctcatgtaatttctattaggatcacttataagcaaaacaccatctattcctttgttaaccattgcttttcttaaatttttaattctctcactatacatttaagacgtctcccttctgacaccaaaaacccatacattaattttatactatattaaattacaacttaacccataatctaacatgcattaacatattaagttattccaaaattacacatggttgaccaatgttattttatcaaaacttataattatttgcaaatttatttttttatcatcatctattaaattttaactgtattttacaatccttgttattatctttgttatttacaactatattatcaatcccacttatactatcatcttttttaaaattattaattatttttatgagcctgtctttggaaaaaggaaagcttatatctacattaatgcaatctgtatttttatcatcttcctttatatcatccactgtaacctcatcatatccatttagtttgtgcagtattttttcataacttaagctttgtttttttacttttgcaatttttattatatttacacttttattcttataattttcattgtatttttctatatttaacatgcttaaaaaaaacaaaagacatatcaaaactgaaaaaatcaacattttattcctcattttctttcacccttacacttaaattatagcaattgcttttatccaagtctttagcaacatccttaactataaatttcttgttcttttctaaatcataaataactccctcaatggtatcgctatcacatataagactaaaggttattatattgtcttttatgcatacggtgtcccaatttaatttatctactgtattaaaaaacttctcaatactttcttcatatttctcattaatttcttttctagttacgtctcttctattaattacacttttttcttgatatactctagcagtattttgaactttactattcaaataaaaaaaagctaattcaaatacatttaaaataaccaaacttaatataataagaaaaataaagaagttctttttattgtacttttttatcttaatctcataaggcaaaaaattattttcactcatatctttcctttcaattacacaatcaactttattaatttacttttacttattggttctaatctacatactttaaaattagtttttaacagcttaaatatctcttcatcatctgtaataccgttaaccacataagcacttctaaagcattttttatccacattattagttatgaaattttccatgtaaactttaagggaatataattttctattttttctacaatatactccgttagcatatatataatcgtctttaattacaatggtatagacatcttttttataggaaaagcatataataaaatttttatccttgataatttttttgtaatattcaataaaacaaaactgtatcatttttacagcctttaaattcttattttccatgtccttatccatatgtcttaagttatcggtatttatgaaaaatacaatcacctttacctttccacttttttcttcaagttttctataactaaaaatcaatcttttttctccatggtacaaaaacttaagttcatgatttatcatgtatgagagtttgttatcacagaccttgggaaactcaaaaaactttatatatatttcttctccttctattaccacataagtttttctactctttaaatcaaagaacttatctgtagtttttatatcttccattgtaattttatttaacatatttaagtaggttttttctacacaatcgtaattgacagcataaatctctttaaattctttcataaactcatcctctcatataccatcttctatgtaaatttcacaattattattttttgtccttactatagacttttgaagttcacttatatacttttttctctcgcactcaatgttatacaagtaaaatgccacaagaacacacagcataccaattataagagcataaaccatactaaatcctctattctttattcttttattggaaaacactttctaagccttcttccatcatttaatgttgcatacacataaaacacatttttattctgcaaaacattgaagccactaactttctccatgatattattggatgttacttttaagtttaaaatatagtagtctatcactactttactcgtatactgatttaaacgaattatgtcaaaggcattttcatccttaactatctttatttcattattattttcaattttcactgtaccttcctttaaaaatttatttataattataagtccacttgaaaaattcgcttgatcattattacttttcatatctttcttatacccatttattaagctaaataaaacagaaattgcaaacacagtaaacacacaaaaaatagctgaagctgctaccatttcaataagcgtaaatccctttttcactttgtaaaattgcatacaaaaatcttttcctttcccataatatcagtgtaaagcttaagagttattttcattttcccattttcatttaactccgatactgtaatgtagggatatgtattcaaattagttttaccaatcttttttaagtccgcttcatattggttttccgatatttcattttttgataaatacatcttgcccttttcacataattcctcaacgtcattattatcatcattaaagattatttcattttttacagcatcaatataataagtataattttgaatatcatcattaatttttcccatttttaactcgtctactttcaaatttactgcaaataaaaacaatatagaaaatatactaaaagagcacataacctcaatcaatgtaaatccttttttattccttaacttccacatttccagttcctacacatatcgtaattatatgtgtttctcctttattatctttatacaaaattgaacatgcatttaaaagcattccactatcatctattgtgattgaaccatcatagattaatactggttgaagtttaaaatcctctggcagtgtaaaggtatctatattagaattaatgtctctatgaaatattacacaatttgatttactattaaaaaacatctttccagttatattcctgctaatacaatagtttctactactatttataaagttaatcatttcattatttacatacttaacctcaattccatttttaatatccttatagcttttaaagcttattgcaataactgaacacaaaataagcataatcgctattgtacaaagaagttctattaaaatatagccctttttactttgtcttgaagtcataagtaactcttcttccatctattttaacctcacaacttaagttactacacttaaaatctacatctatatcgctatcatccactgctcttacttgcactttattatctttaacactcaaatcctcatttatgttgtctaaaacctgttcattatcaaatttgccttccttcatatagcttctcattgcactttgaaaaacaagcgctgccatgtcctttgccttctcattatttgctcttcttatataagaatatatattaggcactagtatggctccaagtatagctattatagacatggaaattataagttcaatgagtgtaaagcccctttttttcatcaccttaaaactctcctttatatagaattcattatattaatcattggaagaattgaagatattattacggttccaacaaatacggctaaaaatattatcatacatggttctataaaatttattattctttttaaatcatctttaaattgttctctgtataagtctgatatatttctcataatttcctctatgttaccgcactcttctgccattataagcatattcttagtttgtcttgtaaaaatatttattttctgaaagctctctctaaaatccttaccatttcttaaattttcaattatatcttttatgcatttttctgcatatgtattttctaaaacctttgaagctatatgcatcgcctttattatatcaattccgcttttaatgagtatgtatagtgtatttgaaaatcttaatgctattttgtttttataaatctcagataaaaatggaattctaaattttaattcatctaacttcattctatttttcttaaccctaagtaatttctttgatatgccataaataattagtataaaagcaataatacctagaaaatcatccttaataaaaaagctcacacttaatataaactcagttatcttaggaagtttaccaccaagagaattcaaagtttctacaaatctaggaataactttagaaactaaaaacaccaaaattattattgtaaaagcaaacacaatggctggataggttgttgcattttttatcttctcttctgttttccactgatctttataatattctccaagattcctaaatacctcagataaattaccactttcctctcctataaaaagcatgcttttaaaaaaatatggtatactatctccacaatattgaacactcttatatatggaattaccattttcaattcccttttctatgcacttaataattcttctcatatttccttgaaatttatcatacattatacttaagctttcacatatgttaaatccagcattcatcatataagacatttgttttgaaaaaatatatagttctttacttgatacttttttatttcttataaacttttttttagctattactttagaggaaatcaaaaaatacttgttatgtctaagctccattattaattcatactcactattagaaaagctttctccctttacaacattgccttccatatttatagctttatacctatactctttcatggattaactccttaaatattataaattactctcttaaattcgctaaaggtggtttctcctcttttaactaattccattccacttttttttaatgttttcacaccagactgtataaagtatctttttatacaatcagctcctttagattccgctattatatctcttacatcatcgtttattgatataatctcaaacacagcctttcttccatggtatcctgaaaaatcacacttgctgcagcctctgcctttatacaaaacctcacttgaattaagtcctaaaacctttctttcatagtcattaggtttatattcctctttacaatgtacgcaaatagttctaaggagtctctgagctataacaccatttaatgcatctagtataagatatttttgaattcccatatcacacaatctattaattgcagaaaaggcatcgttagtatgcagagtactaagtacaagatgtccagttatagcagctctaactgctatttcagctgtagtttcatctcttatttccccaaccattataatatctgggtcctgccttaatatatttttaagacctgatgaaaatgtaatcccagcttcataatttacgttaatttgatttataccctctataatcatttctactggatcttctatagtaactatattcttttcttctgaattaagctttgatattgctgaatatagggtagtactcttcccactgccagttggaccagtcagaagtactataccattaggtttttcaagcaaacccgcgacttcattttcatttactcctgttatgtcactaaaacttaaggctgcattatttttatatagtacccttattacaattttttctccaaaaatagtaggtatactggaaactctaaaatcacaatttttgtagtacattcttccatcctgtggagctttttttataacaatattcatgtcagccattatttttattcttatacaaacagattcatatgccttaaggggtagctccattaccttttttaaaacaccatcaattcttatcctcacaaccgcaatatctttaaaaggttctatgtgtatatcacttccatttttactaagtgctaagtcaattattgaatcaacaagaagtactgatggagaataactcttagcctttttaacctcatagagtttctgattttcttcttcttttttcatatcatttatagccttatgacccaattccaaactagtatatatctttatgtatttttcaatttgctctttataccccttgtatacaaaaatctcttttcttaataaaaattttaaatcctttataatctccttagataccttcccaaaggaggcaacacaaaccttactttcatcaaaataaaatggaaatacattatagctgcaaattgacttcatatctatagctgctataagcttttccttatttatgtcacattcatctaaatctacaatttttaattcactcacttaacacaccactcttatacattagcttactatatttgaaattattgacacaaaataattatatatactcttaaagtagaatttattatacacaatataaaccaaaacttacattttaggttatattgtgtataataagattagtttaaacgtactaggagtgaggttatgaaaaatataaaaatacttctatttaatatactgaatttaattataatttctataatgttgctaacagtttatctaaaaaacagaatatcctctaaaacatttgataacttaatgtttctatacggattattgttcttcttattacttgtcacaaatattattatgataattaataaaaataatagagctaaatgataactacaattatcatttagccctattaaaacctagcatattttattttaaaagtattagacagtactttttaaaagtaatttttcttatttaaagagattacaagtaataagctatactaatctcaataactatcttattacttataattatctacttcgaaagatgatattttatcaaatatgatataatctgtttttacaacattaggctttgaaggatcagttatgtcaaattgaaaaaacggatctccacttcctgcagctcttaacttataccaatctataaatttgttaactacatccatagttacattgaactgtttagtttgaccattcgtcatagttatactaagtacagccttatctgtatttacttcttggcttactgttactgtgcattttgatgttttaccatcagcagttgctgctgttattgttgcttgtccttctttcactccagtaattttccctgaaccatccactgttacaacagagctatcacttgatgtccatgttactccttctgtcgaaggactaacatctgccaataaattatcagtttgtccaacatttattgaatctgttgttttatttaaacttatagtagttgaatttataacatttatcgtacactgtacactcaaattacttccatcctgtgtaactgctgttatagtagcttttccttcttttactgctgtaacttttccatttgaatctactgttaccacatttggatcactcgatgtccatgttacagccttattggttgtatcatttggagttactgctgctgttaatgtatctgtttgtcctacctctaacgaacttgtgtttttatttaatgttatacctgttgctaaagttgattctgaatgtactaaataaccagttgaatctatatctattgcatccaaattaaaccatacaccattaacaacattaggatctccttttacatcggtataaatctttacatcatgacattttaactgtaaatctgatttttcataagcaagtgttacaaattgattttttacactagggttatatacttcaatatttccatcaatatctacataaatttttttactatgatcctgccatgtgcatgcaataattctaagtttactcccataaaatctaaatttaatttctgcataagattgatttttagaaatagtagtgtgcgcggtagaattatagtcccttgaatcagtaatggctcccatgctgctactgtaagtgaaatttttattattatcgtctactcttttccatcctatttcaggatgcaataactgatctccgactttggcactattgtcaaccgtattgttaaaattagattttccaatttcattaccatcattggtattatccgcaaaaacacttgtaaaacatccaagtattacgattaaaaataccactaaagaaactttaaatttgtttttcattttctctcccccttaaacttatgtattatttttactaataacctatattattataaacaagtatttaaattcaatcaaattctaaagtattgaaaaaaactcccctcttttttgctataccatatatatcttatatactacatttttctcacttaattgaattattattccatattatgtttttaatttcattcattttgttgtctgctgtaaaatataagctttttaatattagttatattttttaaaaataggcacatctacaccagaaattaattttacattaaattcatctgcacaatcaatatactgcatagtactagtactcctcgtagttataaaataatcaacatttctaaataaacttttttcatcttgatcttttactatcaaaatatgaggtgaatttgtttcactaaaagcatttttatatactttattaattttaaattgatctttttccttaacatttgctattaatgtaatatcatcttttttcgaaaatgtatttatatattccaagaaaactttttcccatattggatatctgtcattaaaatccgggataaataatatatcctttgacttctcctttaatgatagttttgaagaatctacatttgtatccttataaaactcatttgtaaagacttctatttttttaccataccatttaatatttttatctaatttatccttactccaattccaccattttatgctttgaagttttttatctcgatagcatcaaatctatattttattattttcatgggatttccaactgcaattgcatagggtggtacattttttgtaactacagttccagcccctattactgctccattacctattcttactcccgaaagtatgataacgttatttcctatccatacatcatgtcctatgattatctgtccttttctatgcaattttctttctatctctaatattggagccgtagaaatagacttataatcatgatttctatctaccaaaagcataaccttgtacccaatagaacaataattgcctatatgaatgtttacaatctcactacctggagacacttgaatatccatatcatttatataactatttcttcctatagtaagcagcggaaaatcctttttatccccattttgaaaaacaaaacttcttattgaatcattagatgaaatattaatcatttattctttctcctttatatttagtagccattatcttttaaacacactaacttaattttgaatcttactcttctatattaaatatttatatgtaattgttttttaataaagaatttacttatttcatacaattaaacttttgaaaataaaaaagcagcccctataaggctgcttttaacatactactttaaagttctatattccaatttatattttcttgaagaagctttgcgcattttattagatatttttcctctaattcagtaaatcttcctatttcttcactatctatatctaatacagctttaaccttaccttctacaataattggaagtactatttctgaattggacgccgcatcacaagctatatgtcctttaaaatcatgtacattctctattctcataacttttttatctttaaatgctgttccacaaacaccctcacctattttaatttcagtacacgctggcataccttgaaatggtccaagtattagcttgtccctatttgcaatataaaatccacaccaattaattcttcctattaaagcattcataagtgccgatgcatttgatagctttgttatactattttcctctccttctattaatcccttaagcataataaccatattttcatatttatcttctgtactcatatctttaaaaacgcttatatcaaacatattaattcctctcttcctaaatagcaattacttaaatctataagcttaattatatctaatgtttacataaaatccaacctaaaatttttattacaacctaatcaaaactcttagagccaatttttttagttgaactactttctatataaatgttatactaaaaacaattgacctcttacttttcaatgaaaggaattgatattacatggcattagatggtatatatatacacagcatattacatgaacttaaagataaattactaggcggaagaatctcaaaggtaaaccagcctgaaaaagatgaaataaatttaactataagaactacttcaaattcaaatataaaattacttataagtgcaaatccaacttatcctaagatacatattactgatttaataaaaacaaacccaataaaagcacccatgttttgtatggtgctaagaaaacatcttttaaattctagaatattaaagatagatcaaattgaaagtgatagaatagtcataatagactttgaaactactgatgaattgggttttaacagtatatataaattatatatagagataatgggtcgtcatagcaacatatctcttgttagagagcacgataacacaataatggattgcataaagcatataactccagaggtaaatagatataggactcttcttcccggttgtgaatttgttcttcctccaaaaagtgataagcttaatccctttaattttgaatacaatgatttaaaggactacatatctgaaaaagacattacaaaaaatccaaacatgttttcaaaaacattcaccggagttagctcaactttatcaaaagaactatattttaacgtagaaaaacttaactcgcttgaagctgctttcgattacttaaaaactatatttgataaagtaaaaaataatgatttctattttgcatcatacttgactaatggatatgttaaggacttttactgtttaagattaaattacttagaaggttttagtgaaaaaacatatgcaacaccttctcttcttattcaagagttttattttgagaaagacaaagccgaaagattaaagaatagatcttctgatcttcaaaaaatagtaaatactaatcttgaaagatgcagaaagaaaaatgaaatttatgaagatgagttaaatgaatgtgctaataaggatacctacaaaatatacggagaacttctcacctccaatatatatacgataaaaaagggagataagactgcaactgtactaaactactattctgaaggcaatgaaagcattacaataaaattagatgaaaataagacaccttctgaaaatattcaacgttattttaaaaaatataacaaacttaaaaagacagaggaaaatgcacaaattcaaattaaaaataacaatgaggaaatagaatatctgcagtctgttttgacaaacatcgaaaacagcgatacttacagtgatattgaagatattcgtcaagaacttatagatacagagtatataagattctccaagaaaaataaacaaaagaaaaaggataaaatatcaaagcctatgcacattaaatccaaggatggaatagatatgtacataggtaaaaataataaacaaaatgattacttaactttaaaatttgcagataaaagagatatatggtttcataccaaaaatatacctggttctcatattatagtgaaaaattttggtgatataccggaaacaactcttatagaagctgctagtatagctgcatattatagtaaagctagagaatcatcaaatgtagcagtagactatacagaagtgaaaaatgttagaaaaccttctggtgctaagccaggtatggttatctactacaccaacaaaaccatttatacaaatcctaaagaaccaattacataaaaaactgcgaagcttttgttagcttcgcagtttttcttttatgcagttttttcttcttgtctttccgataagcttttctctggaagaataagattcaatactattccaacgatggttgcaagagcgactccagatattaccacaggtgaaccattgaatttaaagtttattgatgctccacctatccctagaactattattacagatgttactataagattctttttaagagaaaaatctatttttccatctacaaacattctataaccagaagatgctattataccaaataggagtatactaactccacccattacaggtctaggcatatttgctattactgatgcaacaggacctataaaggataatattattgcaattacagccgctatccctattacccatacgctgtaaaccttagttattgccataactcctatgttttctccataagttgtatttggaggacctcctactaaaccagcaaaaatagttgctacaccatctccaagcattgatctatgaattccaggttcttttgtaaaatctcttcctacaacattgttagttacatatacatgccctatatgctcagctatagtaacaaatgacacaggtgccataataatcatagcatttatattaaacttaggtgtcataaatggcggaatttcaaatagtttagctgataatatagtgtgaattgtcttatctggaacaacgcctaaaagtagcgcaagcacatatccacatattatagcaataagtattggaataactcctaaaaaacctttaaaatacatgcttcctataactcctacagcaagtgtaaccatagatactactatccaagaagttcttgatgctcctgaagttatagcttgatgtggatccagtcctgcccaaccaattgcacttgatgccaaactaagtcctattactattacaacagatccaactactacaggagacagtatcttatttaaccaattaactcctgtataccttataattgttgatactattatataaactatacctgctgaaataacacctgaaagcattgcatttggtccatagttttgtgaagcagttaccattggtgttataaatgcaaaagacgatcctatgtaagctgggagttttgcttttgtacataaaatgtacaaaatagttccaactccgctgcagaaaagccctatagaaggattcatgtgcgttaaaattggtactaaaatagttgcacctaccattgcaaataaatgttgaaaactaagcggtattgtttttcctattggtaatttttcttctacgtctataaagttcttcaaaataattcctcctttttagcctctctggactatattaaaagtacctctatataattttcttgttaaacgttaatcaaaatatcttaactgaagtttaaataaaaactacaactcataaatgtttactgaatcctcttcatctattcctttaacatttaccgatatcaattcactttttgatgtaggtacattttttccaacataatctgcccttataggaagttctctatgtcccctatctatcaaaactgcaagctgtatcatctttggtcttcctctatgcataatagcttctatggctgctctgcatgttcttcctgtatataaaacgtcatcaacaagtattactaccttatcctttacatcttcatatacttcctcatcttttactattggttgagaacttaccgtagacaaatcgtctctatataaggttatatctacttttcctagcttaaccttacttccttctatttcttcaattatatccgctattctatcggctattggaactcctcttctctttattcctactagtactatatcatctatacctttattcttttctataatttcatgtgctattctggtcaaagtcctttgcatagccttatcatctaaaatctttgcttttaaattcatacactcacctccagtataaaatttttcaattcaatctataacttttaaatcaaataaaaaagcccaaccaaaaggtcaggtttatctctataacaaattaattaaaccttaagacctcacaggatcactttaaaggaaattttactaccacatatgttaacacaaatttaaatttatttcaattcatttcttaaaatagttattattttttgaaaatgagacggtgcttctctttcaaattccatatattttccctttgtaggatgaataaatcctagcttttgagcgtgaagcatttgcccttctaaattaaatctttgctttttatatccatacaaaggatcacctacaagagcatgcccaatatatgccatatgcactcttatttgatgggttctccccgtttcaagcttacattcaattaatgtactgtttctatatctctcaagtaccttataatgagtaacagcattccttcctccctttactactgcaatctttactctttccaccggatgcctagctagaggtttatcaacggttccttcatcttcctttatgattccctcaacaactgctctataaactctattcatagaatgttctttgagttgattagcaagatttttatgggctgcatcatttttagctacaacaagtatacctgaagtatctttatctattctatgtacaattcccggtcgcaatacaccatttattcctgataaatccttacaatgataaagtaaagcattaacaagggtaccattatagtttccaggcgccggatgcactaccataccttgagccttgtttaccacaactatatctctatcctcatagactatatcaagtggtatattttctgcctctattttaagttcttcattatcgggaatttcaaattcaacattgtctctagattttaatttataattactttttacagcttttccatttacaaagacctttttctttcctattaaatcttgaatatgagaccttgatatattttcgaattcttgtgccaaataaacatctattctttgattttcatattcctcttctataataaaattatacttttccatcttttttatcatcctttaatacaataaaaattgcaatcattattgtcccaactacaacacatatatcagcaacattgaaaactggatagtaatatatatctttgtaatgaagtgaaaacaagtcaaccacatatttataaaaaactctatcatataagtttcccaaagctcctgatattactaagcttagagatattcttgccaatttacttttgggtctgtattttatcatataaactataattgctgagagtacaagtaaagtaactgctgaaagtactaatgtttttcctgaaaagattccccaagctgctcccctattttcaacataagttaaatcaaagaagttcttaataataggaatatcttgaaccttctttaatttatctagagcccaaattttagtcaatctatcaactaaaatacctactgctactacaagtatttccacactaatcctcctgtccaaaaataaatacattgaagagtggcaagtttttaataaacccctctcaaacctgccactctttatttttctaaaatcaatcagtcaggaagttgatctctgtattgggaattgcttactttttctatagattcaacatacccatagtcttcactatcatcatcatcaaattcttcatacttctctattttgtcaaattcctgaaccttttcataactatcttctaaatcaaatgcatttcttatatttccatcataaaatggatatccaagtacatcttcttccggtggcctatcatttttctctcttggcattgaatcatttagcttgttttgacactcaacgcaattttcagcataaggtacaaactccagtctttcttcacttattggcttaccacaaacttcacaaattccatatcctccatgctctaccttatctatagcgtttcctattttatttagaagtgcttcttcattttttctaaacgccattcctctctgtatgtcattaaattcagatgccaaatcagaaggatgattgtcataataagacaattctgaggctatttccattttagagtctatagtatcgttttttctcatctgctcaataagttccattaaactctttctttcaaacataagtttatttttaaaataatcaagcttcttcttatccataataatccttcctccattatactctatagaagacatagggtttatgaaatttaatttccctataaggattattatttgaaaataataaaatattataacaagcttatcatattctttaatattgtagaagaattttttatagcaataggcaaaaatttctcataatccatatgagcaccattgttagcattatctgatatagatcttattacaacaaatggtatattattcaaatatgcagtatgagctatacttccaccttccatttcacatgcaagtgcatcaaactcactgctgagccatttaattttatctatatctgcaacaaattgatcaccagttgctattctacctatataagccttttgcttatcaaaactctcgcacacttttttagcaagttcaactaatctattactgcatctaaaatcaaaagtatccaacctaggtatttgtcctactctgtcaccaaaagctgtggtatccatatcatgctgaacaagactattggctattacaatatctcctggaagaatatcttttccaattccacctgctacacctacatttattataaaatccacattaaagtcatctgctaaaatttgagtacatatagcagcattgaccttgcctataccacaccttactataactacattttttccacttaattttcccaagttaaatatcatttcagcctttttttcctgcctttgtggttccatttcctttaaaaggatttctaattcctcatccattgctccaataattccaatagtcattatagagacctccttataaattttaaatatattcacaaaaaaatcccacatagaagtgagattttaagcataaagtttaccatataaacttaaattattcataaatgcaaataattatttaacaaagaactttttaacctcttctaaatcatcagcaaagcttttatcagaatcatcaaatgtactttctacttctactgatgatggttttacactttcaggttcaatctctttttcatttatactttcagtagttgacacattataattgctttcaaaatcattttcaagagaattaaacatatcaagctgagaattcatgaaatttctgtatttagctctaaatctcataaactgctgcttaacattatcgtaatcatcatttatttttattacatcttgatttgctttatcaattattctttgagccgtatcattagcattcttaagtatcaagtcactctccgtcttagcagactgctttgcttgttcagcagcattttgagctaaaatcaaagtgttttgaattgtgtcttcaattttctcataatgtgctaacttctcttttaatatagagtttctttccttaagctctgaattttccttataaagctgctcataattctctgaaacctgatctaaaaattgatcaacttcttcagtatcaaagcctcttaatgttctcctaaactctttattatttatatccattggcgttaatctaacatccatagtatcacctcagtttcttaatttccttattgtttaataattttttataataaaaagctaataataaccgtctgaattaaactgagtaaagcccaagcaataataggagaaaaatcaatcataagtcctggtataattttttcttggattctcctaaaaggcatcaaaagtggtgctgttatcctacctacaagttctcttatctcatataatgaatcacttggtataaaagatagtatacactcaagtattataagccattttaagattgtaaatatgctagttacagctctaaccagtataggcattttatttatcctccattattatttagaccaattaaaaatgcttttacttgctaaatcatttttaagatctcttgatatatcaacatttgaaggtgataacaaatagacccctttatcaatttctaaaagctcaccatttaatacgtaacttgctcctcccataaaatcaagaagtctttgtgctgttttaggctctaaatctgtaacattaactacaactatttttctattttttaaatcatcacaaatttgagttgcctcatcataatctttaggtttaacaataacaacctttacagaagaagctgtatgtatatttaccactttattattactattgctgctatttttatcatttaatttttcatcatagtcataactattttctcttgctattgctttttcttccattacttcatcttcatactcatcaaaatcctcatcattaagtcctattattcccataactttgtttaaaactttacttgccatttttttaacctcctaataataaatactatattttattgtagtctcttttgccgaatataccttctcctaccctgacaatattagcgccttctgctatagcaatctcataatcatgagtcatacccatagacaaatacttcatatcaacattttttatattcttatgttttaaatcatcaaagatagctttcatctttctaaagtaatgtctattgctattatcatcacctacaggtattactgccatcaatccctttacatttacactattacatttttggcattcatctaataaagcctctaaattttcttctaaaattccagttttactttcctctcttcctatattaacatatataagaacatcggcttttaaaccttcattggtataacgtttttctatttcctttaaaagttttatactatcaagagaatgtattaaaaaaacctttcccactatgtatttaaccttattaacttgaagatgacctataagatgccacctaacatcgctattcatttcatcatatttactcataagctcttgaactttattttctccaaaatctctaataccttgttcataagcttctttaatgtcttcaatgggtttggttttagatacagctacaagagtaacttcctttggaattttttcttttaccttctgcaggttataagttatacccaattttatcgtctcccttataatatattctccataaaaacaaaaaaaccttcacacttaacaaatttttaatataatttaataattttcttaagaaaaattttgatagttactttgatttaatatttgaatgccttaactcacccttaaaagctggaatttttacatcgttaacagtctttagattaacatatatacttcttctttttagtctctgaagataatttccgcttgccagcatataagtttttaacttatttttatttcctattgcctttatattaaacggagcacttattttaaccccatttataagtagaaactcagcattacagtatatttcagtgttacttacaattctctgaccatttatagatatagcctctgctcctgaacattttatgtcattaattacagctctcatatcaaaatcatggataacctgatatatggttcttatttctctaaaattagcatcttcactactagctgaaacttgatttccactatcatcaagtgtaatttcaacaccttctcctactacatcaagtgtaccaagttccattttattcaatatcaactcatcctccatttgtcttttggtactttcaaaatccttgcttgatttattataatcctttatgctattttttaaatcaaaatattgttcatttatattatttatatcatttaaaagcacacttttttttctatatgcgtcctcgtactgttttgaattaagataaactaacttcttttctttatttccaaaactcatatttgatgatataaggacgcctaaaaaaactgaagcaataaatataaaaattgaagcctcattgtttttcataaaaacaccccgttagcgatttttagccatctctatgagttttctccttatatctgcgaaattattaaaaattctagtaccaaatacaattacagccgctagatatattggaagtcccaatttatctcctaaatatacaagtgcaactgctagtactgcatttccaaagaatccagatataaatatatcagatttaaactgcttatctaatccagcccttactgcaccaaaaactgaatctaagcaggcaaaaattgcaactgaaatatatggtgaaaatttatcaggaattggaacattccataccactcctattattatacctattagtagtccaaaaattgcaatcacaaaatcacctcattatttacttataggcttagcataatcaaattttataactttatttgtcttacctattttaatacttccatatttatcataatcagccttgtatcctgatggtacacttgaaagtacacctggataagaaagtgcagaataaaggagcttactatcacctatagctttaattgttatcttctcatatggagatattctgtcatcgcctacaaatatatctgaacctccactagaacttcttattcctgtcattgaagtaatccttacatcatttatagatatagcttccgcctgtgaaaaattcaattcattaattaggtacaataaatcttctccagttattacatcattattttgacctgtagaattattggtagaagatgatatattttgtggagttatcactagtataatacctgggcctgtaacatctacacttccaattagcatattacttgtgtttaattcatttactatctgtttattcattgaaccactactagctgcagcattttgatatccctttacctgactttgaagctcatttacttttttttgcaagtcactcttttctttgctaagcttattcaattcttctgatatttctgcactttccatacctgtattttgttttgtgtcttgaaaacttacaattttaagttgatgtgctatcataaaacctaaaatacaacatacaaaggctactccaatctgtgcaccgaattttttcatactaacgcctccctactgctgcaatgaatatacaggatttcccttgaaacttacatccacatatccttttttatcaattagcttttgagaaattattacatttactgcttcattcagcttattataaatatcgtcaggcgttccaataactacacacatatttttaaaataaacctttaagctcaaaatatgagacatgtccacatccgtaatttttaaattattatcttttatcgatacactagttatttgattaattaattcaagccttcttgaatcacaaggaatttcagttcctatttttccatttttcaaggtaaccccatccaattttattaaattcattcctgatatgttctttcttatttccaataatacaccatttttatcaataataaaatagttttctccactgtttatataaaaaaccgcctgtctttcttttacaataatatcaatagtattcggcaatttttgcctaatagaaacattcttgatatatggatcctgcataatattatctttatatttatttaaatttaaataaaaaatattattaccttttttaagcttagaattttctattatattatcagattttattatcttatttccttctacatttatatattttatattaaaatatggtaattttaagcataatgttacaagaatacatattaataaaaataaaaatattgttattctttttcttcttcttttttttcttcttttcactatgtactcattttcctctttcatatattcacctttttctaatataatataagtttttgtaaactaaattcaagaaaaaattatttatactgtctttgaatttacatttgtaattaaattatagggtttctatagtaaaacttaacctaattcaaaattaagcatcacataagaaaccctataattacttatttccttgagatgaaatattaagtaatatccccatagctataagattaaaaagcagtgaggatcctccataacttataaacggaagtggtacacctgttacaggcatagaacccgttacaactgctatatttattattgcctgtactgctattactgatgttattccaaccgccaaaagcataccatatgtatcttttgcattcatagctatcttaattcctctttgtattaacacaataaataatattataatgaaaatacatcctataaggcctaattcctctcctattatagagaatataaaatcattgtaaggttcaggtatataataacacttttgccttgactgtccaaagccaagtccctttaaacctccagatcctagggccaacaaagattgacaaagctgatatccaacaccttgagaatccttccaaggatttctaaatgtcataaatcttttatatctatagctctctgctgttatgaaaaataatcctgcaggtatcattgctacaaatatagaaactatatgtcttaatttagctccaccgacaaacattactattaaactaactaccattattacagttgctatactaagatttttttcaatataaacaagtccagcaaaaaacattgcgattaaaagataagctacaaaattaggaatgaattttttaatcttatcaccatttttctcaatggcctttgcaagtacaagaactataacatattttgctatctcagatggttgaagatttccgaaaggtccaattcttatccatctatatgctccatttataggtggaaaagctaaaactactagaaggagaattacggtaactacaaccaattttgatgttactttcttaagtaaatgatagtctattttttctattattaagagtattattatactcccaatagcccagacaccttgctttttcaaaaagaacatatcatcataattatacattgaactgttgagcgcactgtatgaactagcgctataaatcataattactcctatcgccacaagtaaaagcacagttgcaaaaagcacaaaatcaacttcaaccttttgaagcagttttggttttgacatacataaacctcccaaatatcatactaaattaaagatagaaaagctattaagcaaagtataactgtcacaattgaaaatacagaaacaacttttgtttcatgccatccaagtttttcaaaatgatggtgtattggtgccattttaaatactctttttcctgtaagtttaaaataacttacttgaattatatcagacaatacttcaataacatatattccacctacaattataaccaataatggtaatttcaataccaaagcaattgctgcaactgctcccccaagaccaatagatccagtatcgcccatgaaaatttgtgcaggatatgaattgtattttaggaaacctaaaagtatacctacaataattccacaaaagactgatagctcatattgatgccacgaaaaacttactactgtgaaaaaagttacaactaatattgtcactgatgatgcaagtccatcgagtccatctgtaagatttacagcattggtaactgccacaaaataaaacacaacagctgccatataaactataggtggaagcgtccatgttatttttagaaaaggaataaaagtatcacttccaaaacgtatataagcataatatgaaatagctgcagaaactataatttgaagaagaaacttttgcttcgaagtaagtccttcattctttttatgaagaattttaagagaatcatctataagtcctatcatagcaaatgaaaaaaagcatacaaatgcaaatacagcgttactattaaggttttttctcattataatcattgctataatagctgtagttataaatataattccccccatagttggagttccagcttttttcatatgatttttgggaccatcttcacgtattggctgaccaaactttaatttgtgtaatattggaataaataatggtccttgaagtattgaaaatagaaacgaaattagtactgaataaatgataactcccattttatatctccttatctagttctttaagttttgtaactatattttcaaatttcataagcctagatgcttttataaggaatatatctccttttcgtatatctgttttcacaaattttaaaagctcttcatttgtttcaaactcactaaagttttctttatctttatatccatctagataagctttactaaactctccaactactaaaagttcatctatattattttcttttgcataagctccaacttctttatgagattcataagacttttctccaagttctctcattgtaccaagcactgctattcttctatttcccttaagattctttgttacatcaatagccgctatcatagaatcaggacttgcattataagaatcatctacaattactatattttcaccatttacaatatcaagcctcatagctgtaagttctaaatcttttagaccttttctaatttcttcaaaagtcaaaccaagttttaaagctgctgcaatagacagcatagcattttcaatattatgtttccctggcatatttaaaacaagtttttcaccctgaacttcaaattctgaatttccttcatgtaaacacaaattttcagcatttaaattaccttctttatttaaagacgtctttagaacatttatgctcttaaattcatgtttttttaacaaatcattatcaccatttacaataagtaaattatccttggtaaagaaatctgttatttccagtttggcctttaatatattttctctactcttaagattctcaatgtgagatattcctatattagttataagagctatatctggtcttgcagcctttgccatattgtgtatttcattaaaatgattcatacccatttccaatactgcaacttcataacttttatcaagcttgaatatcatgagaggaagacctatttcgttattaaaatttccagatgttttaaacactctaaatttacttctaagaacagatgctgtgatatcttttgtagaagtttttccagtagaacctgttatagcaaccaccttaatattaagagtacttctataaaattcagctaaatctaaaagtgcttttttagtatcttcaactaataaaatagatatatcttctttaaaagaatctttttcaaaatgaatttcatctacaatgcaaagagctgctcctttttgaactgcattatgtataaacttattcccattaaaattttcgccattaattgcaataaaaatagcaccctttgagagcttccttgtatctatacttacatcattgaatacatctttacttcctcttaaaataacttttccatttacagcttttgcaatttcattaaacgtcaaattctccacttaaaacagctcctttataaattctgaaactatttctttttcatcaaaatgaatagttttatcacctagtatttgataattttcatggcccttaccagccaaaactataacatcgtcctttttagccataagcatagctttttttattgcttcttttctattctctactattacatagttatcagttttaataccttgaactatatcctttattatttcttctggattttcacttctaggattatcagaagttattactgcaatatcactaagcttcgagcctatttcacccattataggtcttttagttttatctctgtctcctccacatccaaaaacagaaataagtcttccctttgtgaattctcttgaagctttaagtaccttttcaagcccatcaggtgtgtgcgcgtaatctaataccacatcaaaatccaaatttgtattgtgggtaactatttcgcatcttccaggaactgatgaaagtttatttaatccatctttcaccttctctatacttattccttcatttaagcatgcagctacacttccaagtgcattatatacattatactttcccggaatgtttattttcacatgctctcttaatcccctataacacaaatcaaattctgttcctcttgatgtcatttttaaattttccgcctttaaatcagccttttctgtaagaccgtaagttattttatcattacctgcatctttgaaaactctttcaccatatttatcatcaatatttattatagaccttttactgtttttaaataatatcatctttgctttataataattttcaaaggttttatgaaaatccaaatgatcttgtgttaaatttgtaaatataccttcttcaaagacgattccgtatactctgtcaagatataatgaatgtgatgacacctccataacacaataatctattttatcatgtaccatatcactaaataatttttgaagctctaatgattctggagttgttctatgactttctatttttttatctcctatgtagtttgctatagtacctataagcccaaccttatatcccgagctttcaagcatagatttcatcatatatgtagaagttgttttaccattggttccagtaatgcctataagctttaacttatgagatggattatcataaaaattggcccccataacagccattgcctttcttccatcctcaaccttaactacagtacaattaggaagctttttaggaaccttagtacatactataacatcagcgcctttttctaccgccttatctataaaatcatgtccatcacttgtatatccttcaatacaaaaaaataatcccttttcattaacttttctcgaatcgtaatttaaattatcaatttctacgttcaaatctccacatataagttcatatttcacatcaccaattatttttttcaatttcataaaatcactcctcaataggtacatagttttgctgtttacacttgtgacttttataatgcattaaattcctttttaaaaattcttcaactaagctatacacttaaaacattaaatatagataaatgacttattactaatctctaaacataaaacttaattatacagcaaaacttgtcaccttctaaagttattttgctgcataaattaagttgttaattagcttaaaactacgctatcaataaatcaaatagctttcaaaggtcatttacgaaaaattaatcactcgctcatattctcttcaagtttaagtgttaaaaccgtacccttattgacctgtttaccagcatcaatactttgcgattcaacaacaccatctcctgaaattttaaaatcaagcccaagactttttaatgtttcttctgcttcttttttactatatccagttaaatttggaactataacatcattattattataattaggactgtctcctgtgtaaagtacaacttttgttccttcttttactgttatgcctggaataggagttgtattgcttacatattccccattaccgtcaacatccgcatctatattaagatttttaagcgtttttatagcatcttcctttttcataccacgtatattcggaataactacatcttttagcatactcttggcagcatcagaacttgatgtatcaggctttattcctagatagttaaatatatcattaaaaaccttctgacctacaggcgcagatatttgacctgcataataatttgatggatccggctcatctatcgagaccattactgtaattttaggatcacttgcaggcgccattccaacaaatgaagctatatactttccgtgctcatatcctcctccattaggatttggcttttgagctgtacctgtttttcccccgatatgatatccatctataaaagcttttttacctccaccttctgagactaccttttcaagatatcctcttaaggtggctgtcatgctttcatctaaaatccttttcttattataatcgctatactctttatctacaacctgtctattattctctacatgacttatttccctcattacatgtggtgttattaaataacctccatttgctacggaattaaaagcctgcatgtattgaaccattgaaacagtattagattgtccaaatgctattgtagctaaatccacaggtcctattttattagttggtctaattattccccgtgcttctcctgggagatctatacctgtttttcttccaaacccaaatttatttatataatcattaagatttttagctccaagcctttctcctagttcagcaaaaccaacattacaagaatttttaagaatatctacaaaagtttcttctccatgccctgttcttttccagcagtggatagtttttttagctacagtaatacttcccccgcagttaaatttatcattctcatgaactatccctaaactcatagctgcactagaagttataaccttaaatatagatccaggctcaaaagcatcacttactactctatttctccaacttttctgaagttcatcataacttttacttttatcccaagggtcattcaaatcataatcaggcttgttagccatagcaagtatttcaccatttttaggattcattataagtattgacacagcctttgctttattattaactaaagcctcttgggcgtacttttcagcaaaatactgcatatttttatctatagtaaggacaacatctctgccatccaacggttttgaatattcagatattgtgtaaggtaaatttgcactatttttatctatctcagcctttctaacccctggcttacctttaaggtatttgttatatttaagttcaacccctgtaagcccatctccatctgagttagtatgtccaataacctgtgataagaaatcgctgtttggataatatctttttgtatcaggagaaaccattactccttttacatttatagctaaaactttattagccttatccttatctattcttcttgttaaaattgcagatcccattggtcttccatctttaaactttttgttaagctgtttagagacatcttttttatccatatcaagtgcactagaaagcctatctgcaagttcgtccattttcatcttcttttcagccaaagaattctttatagtatttaaatccaaatcaactctataaacattaccacttatggctagttcttcgccatttctatctaatattcttcctcttttagctgaaatcttaacttcacttgtccactgttcttgtgccattttcttatacctagaagatcttgcaaccattacattaaaaagcttgtagcatagtaaaaagattacacaagttaaaattagaaatacaataaaaattctatttctaatagtagccttatcaactaatatccttttgggcaacccatacctccttaaaacaacttgctttcgataacctctaaaatacctttactatttgaatcctcggtatccttatctatagtaatgcttttcttcttcaaatcagtatatgccgcatgatttttatctggattaaccatatgtaaatctcctgttgcttttttagatacattgtcaatgccttcggttctaaaaatcctaagtttcaaatcatcattttcattttctatattgctggattgattttgaaccgcttcgagcttattttgaagtgaataaatcttagaatatctatataaaacagtaaaacccagtacaaaagcagcaactataccaaaaataattctagcttgcttcttcatctgaacgtgttttttcatacgttttaattctttttctttctttcttctccttctatagctctccagtaccctttcttcaacacctaagttattttcctcaggtgctagcgcattgttacctttaatctgaaatcttttatccgttattatcaatttattcacctcattccaatattataacttacaaatttattttttctgccactctgagttttgcacttctacttctaggattatattcaagttcgtaactagaagcctctatcggttttcttgtaataatctttatcttaggtttctttccacatacacacattggtatatctttaggacacatacatggatcttgaagctctctatatttatttttaacaattctatcctcaagagaatgaaatgttattatacatattcttccctcactttttaatttatcgaccgaatcctctattgttttatttaaaatttcaagttcttggttaacttctattcttatggcctgaaatgttctctttgccggatgtggtccctgccttctaaattttgcaggaattgctgcctttattatatcaacaagctcaaaagttgtatttatagcttcctcacttctcttttccacaataaatttagctatccttttagcaaacttttcttctccataattctttattattgaataaagtttttcttcatcatatccatttataacatcatatgcagaaaattcactatccctattcattctcatatcaagtggggcgtcattcatatagctgaatcctctttctggctcatccagctgataggatgaaactccaagatctgctaaaattccatctactttatctattttaagttcttctaatatattttttatgttagaaaaattatcgtgtacaaaagtcaaatttttatactctttaagtcgctcgcttgctgccttaagcgcatctttatcttgatctattcctattaaccttcctttacttgaaagtcttttcaaaatctcagaggaatgaccagctccaccaagcgtacaatcaacataaattccatcttcttttatatttaaattttctatagtttcttccaataatacaggaacatgattaaattccataacaaaatctccttttatatcccaagttcactcattttttctgctatcgcattcatatccacacttgattcattgtattctacccatttttccttactccatatttctattcttgtggatactccaatacttatgatttccttattaattgaagcatattctattaaattttgtggtacaagaactcttccctgtttatccaagcttacttcatttgctccagaaaagaaaaacctaacaaaagctcttgcattgtgatttgtaagaggtaactttttcaacttttcctcaagtaccttccattctcctaaagggtatacataaagacatccatctaaacccttagttaaaataaaattatctccaagctcttccctaaatttagagggtataattattctattttttgtatctaaggcatgattatattcacctataaacacactttctacccccttatgtatttttgcaccactttacaccactttaaaccactttttatataattctatatgaatgttaaaattccttcttataaagtcaaaattttaaagttcttaaacttttttagaaaaacttccattcttgaataaataacttgcttagagtataatttataagatgaatttaatttagaagggatgtacacataaatgagattgggaattgtaggtttaccaaatgtaggtaagagtactttatttaacgccataacaaaagcaggagcagaatctgcaaattatcctttttgtactatagaacctaatgtaggagttgtatctgttcctgacaagaggcttgacgttcttgaaaagatgtataattctaaaaagaaagtccatacaagtatagaattttatgatatagcaggtttagtcaaaggagcaagcaaaggagaaggacttggaaataaatttttatctcatataagagaatctgcagccatagtacatgttgtaagatgttttaaagatgataatatagtgcatgtagatggaagcatagatcctatacgtgatattgagaccataaattttgagcttatattttcagaccttgaagttcttgaaaaaagaatagaaaaaactaccaaaacagctcgctccggtgataaaaaagctaaagatgaacttgttatattagaaaaattaaagaaacatcttgaagatggaaaatctgtaagaactcttgaattcactgatgacgaagctgaattcgttaaggggctttttctcctaacttcaaaaccaattctatatgctgctaatgtatctgaagacgatatactatccggtaatgtagaaaatgatatggttaaatctgttcaagattatgcaaaacgtgaaaactctgaagttattcctatttgtgccggtcttgaagaacaactttcttcacttgaagaagaagaacaaaaagaaatgctttctgaatacggacttgaagactctggtctaaatagattaatagaaagaagttacaagctattaggacttatgagcttcttaaccgctggtcctgaagaagtaagagcatggactataaatcaaggaacaaaagcacctgctgctgctggaaaaatacatacagacatcgagagaggctttataagagctgaaatagtttcctatgatgacttgataaactgtggctccgaagctgctgcaaaggaaaagggtctttatagactcgaaggaaaagactacataatgcaagaaggcgatgtagtattctttagatttaatgtgtaatataagttctcatattaaaagaagacggaaaatcgaaaaaaagatttcccgtcttttattttctcttctttcagtgccttctctctcttttgatatcatattttttcatctctatccacgcttttttaattacatcatcccattgttcatccattaaaactttcacggcatctttaatattctcgatagtatatacaaatagatttccttcaataactgccttttcaacatcataatttaatacaatatcatccttattattatcaggtatagcaacagaatatccgtctctgctattatatgaattgcaaactctgtaaaaaccttctatcttatcttttattcctcctactggctgaatctcaccaaattgatttatagatcctgtaactcctatattttgttttataggtattttagtcagtgcggaaatcatacataaagtttccgctacagaagcactatccccttcaagctttccatatacttgctcaaaacacagataaaaatccacaggtattctatcatatcctccaaatatttctcccataagtccctttaagatacttattgattttgaatgaatatttccactcatagaattttctttttgtatgtcaactatatttccacttcctttatgacaagtacaggttaatctaattggctttcctacatctttattgcccaagcttacaacagataatgcatttatttgacctactttactttttgaaaaatccatgagtatcttcttttctttataattttttataatttcttcttctatgatttctcttttgcaaactacttctcttacattttcatcatttatatatttatcatcagttttattagcattattgcaggttaatattaatatttgctttatatccttaggagatatataaagtttatttctattatccgcttttcgtgataactgtctacatatttctttgaatgcagctgatgatatttctttgcctttttcacaattcaaaaaagacttaactattttttctacatatcttattgaattgtcatttatgcttactattggattatattctgcctttattttaaaaagttccctaaaatcctcatctaagttatataaaatgttataggtttcataatctccaattagtatgatctttaaatccacttttataggctccggatttagtcctctaagtgatataagttcaagatgatcctttgtatagtcaagtctcactgtctcatttaaaagtactttttttaggtaatagtaagccattggtttttcaattaaatctttaattctaattattacacagccctcatttgcttttaaaagtgagcctgcttttattaaactcacatccgtaacataatttccaccatgatttttatattcaatgcttcctaaaagattagatagcttaggatcatcctcgtaaatggtaagtggtttattattagtactattatctactataacattaacacagtacttaaaaagtattgcaattattttttcagagtctttttcatagcttgaagtataattttttacaatttcctcttttatatcatcaaacaccttataaatgtataccacggcttctggaacaccttcaaattcattcatatacgagtatttcttttcctctgtctcattttctatataatctttgaaacattcctttaaactctttatttctttctcctctatatcctttagctttgtaaatacaatcttagtactgctttttaattccttcattttgctcaatatgtcttctttttgcgattcgtgaagctcatcatactcttcttctgtaattggttttccttcctttagtggtataaaattaaagccagcctctgaaggctttaattcaaaacctttttcttctgcttcacttagtattttgtttattatagcctttttttcatttcttgcatcttctattataaaatccctttcttctatatctaatgcattataaaatttatatattatgtccctatatattttttttatttcttcaatacagtcataaagcttttttccaaaaccattatttataattatactttgaggtatatctctatcttttcctgtaacataacatatatccttaggactgctttttctacttaaaagataattaacataactttttatatcctttagcatatcagtgctaaaatcatctactacgtatatattgtatcccctatcctttatatcaattccattctttatatcaacatacattttatcataaatattgtttttatctgctctcttatctctgggactaatattgtaaataacatcttcaggagtcaactttttaaccattccacaatccctcccctatattaatattcttataaaaccattttaggaacatttttttggtaagcttaagatttacattcacaaatatttcaacctatgctataataaacgagaataacatatgtacttttaaaaccaacataaaggagttattaatatgagttttaaagataaaatttcagaatcttatacaaaaaatttcttcaaaaaatatggtgatagacttaccaacattcagggaaatgtactttcagtcaaagttgaaagaaaaagtattttatggattttcaataaattgattgcaacaattattataaagccagatagaagtaaagcagtagtaaaatgtgtatacaaaagaaatcgattttttaaaaaacctgattttatgaacatatctcaaggtaatctagtaattattcaaggcttaaaacctgataaaaatgctaaaaagtcaaaaaaatctggtgaggctgtttcaattatgaacataagaaacttaagtacaaaatgcgacttagtgcctgtcgatgatggtggagtaaaaactgctaaaaaaattcaaagaataaaataaaatcaacacttaagctaaataaacaaaagcttaagtgttttttatttatatatttttgcttttattatgatacaaatatagactgtttatcaatgctataaagcttgagaaaaatagtactataatccattgagtaatacttaatgcagaagtatgaaaaagcacttccataaatgggatataaacaacacatacaagcattattacagaaatactgactgctcctagaaggtatatattagtaaataattttatttcaaatagggagtgcttttcagatctacattcaaaaacgtgtactaattgggacatgattaatgtacctaacgccattgttctacttgtctttaatccaaatcccatgtataggcctaccaaaaatgataaaattgtacaaactcctataagacatcctcttataataattttttcactaagtcctctggaaaagattccttcctttctgtctctaggcttatcatccataatatccttatctggtggatctactccaagcgctaatgctggaagaccatctgttgccaaatttataagcaaaatttgtataggtaatagaggagtttgtaaattaaatactgatgataggaacattgttaatacctctcctaaattacatgacaaaagatatcttataaatttcctaatattattatatataactcttccctcttctactgctgctacaattgtagcaaagttgtcatccaaaagtatcattgaagaggcctcttttgttacatctgtacctgatactcccattgatatccctatatctgcttcttttattgctggtgcgtcatttactccatcacctgtcattgcaacaactttattcttctttttaaatgcccttacaattttaagtttatgttctggacttactcttgcaaaaactcttattttgtctgtttttttatataaatccttttcgcttaacttatcaagctcttcaccacttataacttcagatacatctgaacatatattcaattcctttgctatagcaaatgctgtatttttatgatctcctgttatcataactggagttatgcctgcaactctacatttaagaacagcatccttaacttctaatcttggtggatcaatcattcctgcaattcctaaaaaaatcatgtctccatctttatttatgttctcctttttgtatgcacaagcaatgcatcttaatgctttccttgacatactttcaagtaccgaattcactttggatttatatgttgaagtaaataattccaccttattgtttatatatatatacttacacttttctattaccctctctggagcaccttttaagtataaacttgttccatttgcacctttgcttattacagtcatcattttagtcttagaatcaaaaggttcctctcttatcctcttttcctctgaaataaacttctttagttttccagtatctttaaaaaatgctcttattaatgccgtttctgttggatctccaaaaagacacttatcaatacctttttctttaaaattgtaatcacaatcattacagtatatgaaagttctcttaagaagttcaaatctttcttctgaatatagttctttttcataaatctgattattaaaatacatagcttttactgtcatcttattttgagttaaagtacctgtcttatcactacatattatagatgtacatcccagcgtctcaactgcgggaagttttcttacaagtgcatttcttttaagcattctagaaacaccaatggctaatgctacagttactatagctggaagtccttctggaattgctgcaactgctaaacttactcctaagaggaacatttcatatttatcctcacctcttattattccaagcactgtaacaaccacacatattactatacacagtataactaatattttacctaaagatgctaacttctctttaagcggtgtcttttcttgatctatgttatcaagcatatttgcaatcttgcccatctccgttgtcattcctattttaattactcttgcctgacaccttcctgtaagtactgtagttcccatatacaagttgctatccttattattcttagatactccaatagattccccagtaagtagcgattcgtccaccatcatgtttgtcccatcaattaatatacaatcagcaggaattctatctcctgtatccaaaacaactaaatctcctggaactaaattagctgcatccattattcttatgcttccatttcttattacttttgttgttggtgctgtaagtttttttagcgcctctaatgatttttctgttttaaactcttgcacaaatccaataattgcattcattattataattacaattatggttaacgcatctgccttttctcccataagtcctgaaataatagttgcggctataagtacccatatcataacatcgttaaactgtgataagaatatctttatcattgaaatattcttctttttttgtattgtattatagccatatttttttcgtaatcttttagcctcctcttctgacaaaccgcttgctgccctattttcattaatcaatttatcaccccacattgtaaactatatattttatatactacttactcttacactttatgcttatacacacaaaaattatgacgtaaacaaatcattatttacactatgtaaaaatccagttaagttttactctactttccttatataatcatttatactttacaacttacaatttaaattataaaatatataaagaccgaaatttatatacaatttttccggttgagcaattagagtacataataaaaacgaagggatgttgaaaaatggaagatattatttatataactggacataaaaacccagatacagattcaatttgttcagcaatagcatactctgaattaaaaaacaaattaggtttcaatacagttccaggaaggcttggcaacataagccgtgaaacagaatttgctcttaattactttaaagccaatgctcctaaattattagagaatttgtctagtaatcaagatataataatagttgatcataatgaaagagctcaatcagtagataatttagaagatttacatttgcttgaaataatagatcatcacagaatagcagatattcaaacaagctaccctatattcttcagaaatgagcctgttggttgttcaagtacaattataggttcaatgtactttgaaaaaggtatagagccttcaaagagagctgctggtttaatgtgctctgctataatatcagatactcttttatttagatctccaactactacagctagagacaaagaagtcctaaaaaaattagctaaaatagcagatatagaccctgaaaagtatgcttcagaaatgtttaaggctggtacttctttgaagggaaaaacagtcgaagaaatattcaacagcgactacaaagcattcaaccttggagataaaaaaataggggtttctcaagtcacaactatggatatagaaggtttcgatgaatataaaaaagatatgttagcatatatgaataaaaaagttaaagacgaaaattttaatgcagtacttttacttcttacagatattataaaagaaggttctcttataatagctaccggagaaaatactgaccttgtaaataaagcctttaatgttgagcttaaagataatgcagtatatgttcccggaatactttcaagaaaaaaacaagtaataccacctttgacttctgccatagaaggaaaataaaaaaagcacttttacgtgcttttttattttttcatattatttacaatactccacatattatcacctgtctctaaactctttgaatttatctgatatgctctttgagctactatcatatcagtcatttctgttcctaaatccacatttgagttttctagataattttgatatattactgacttgttattcacaaacatctgtgctcccgccttaggtacaaataaactttttcctacagatatcatagaatcatttccagtaacatcatagatatttatcttaccaacatttgttgtggtctgtccgttttgaatacttatggtaccatcctgtgcaacagcaacattactagctgtgaatttaactgtactaggatctacactataatctatattcaggtaatttccatttggatcaactattcttccatttgcatttacagtaaaacttcctgctctttcatatgcctcagttccatccggtgttgttaccttaaagtatccacttccatcgattgctaaagcagtcttagaatcgcttggtgtcaatgatccttgtgcattatttctaatccactcatttgccttaacaccagatccagtataacgattattatcgtcatttgtaactggatatccctttctatttagtgtttcatataataaatcactaaacccaactgtttcacttttataaccagtagtgctactattggccaaattgtttgatatggaatccaacttttcctgctcagcagccattccacttacaccattccacataattctaagcataattcttacacccctttaaacttccactaaacctttcctacttcatttacagctttcccaacagtttcatcaatagactgtactgtcttttgattactttcaaacactctcatagtagtcatcatatcagtcattcctttcatgacattcacattagatccctctagagctttgttttctacactagcattaaaattctgaataggattatctccctgaaaaagattatctccaatcttttttaacttagtataatcattgaaatgtacaaaattaaatttatatttcgctggtccatcaacacttacatttccataaggatcacaactaacgattcctttacccaactttattggttcagtagtatttgtagctaagttagttcccattatataatctcctgaatcatcaagcatatatccatccatatttacatgaaaatgtccatttctcgtataataattttgatctgatccattatttttcctaacagtgaaaaatcctcttccctgtatcgcaaaatctgtgtctatatctgttgcttgtatatttccacctgtaaaatcagtcgcagtatcatttatcctagaacctaaattaagtgttcctaaaagtgttctctcaggtactccattttctcttttagaataattttgaatgagtacgtcttcaaaggattgagatgataaactatcacttttaaaaccaaccgtatttgtgtttgcaagattattagttataacatcttgcttggcttcttgaacaaccattccgcttatagcagtataaagtcctcttaccatataaccacttcctccatcatttactaaccttcatatcaattggatatttcattccataagaatatgctttctgctctatttcacctttggacatagaattattaattttaacagtatacataaataatgtagatataagcattcctatacctataccaaaaagtatttttctatcacacataattgtaaaaattgattttagtttgtatacaatttttgaattaataatacctcaccctttcctaagtctagcttttctgatatttgatctacggtatttccatcttcaagcagttttcttactttacttattttttcattctcattctcttttataatatcatcatctttatctattaaaacattgataccttgattttttgccctatatttactatcgtctattttttcattaattttatacgtatttgtatcttcaccattactaagcttttctatttcctgctgcatttcaagaatcgtttctgcaaattcctgccttaactcacctatttttaaatcatattcatctgtattttttattctattttcaaaattagtttcaaaagaagtatcattttttattgcttttacattcataataataagtataattcccataaatattaagataatgcctgccattaaatcaactccaatttattcatattttagctttttaagtgattttctaaggtgcattatagctctagtatgaagctgacaaactctagattcagacacatttaaaatatttcctattttctttaaagtcaatccttcatagtaatatagtgataataccattctatctttctcattaagaagttctattcccttagcaaggtattcaatttcttctttctcttctaaagccttttcagggcttggacttttctcatcttctatagttcctattaaaggcatatcatcgtcctctgaaaatattaaatcttctaaggatactactgatatataattaatatatccttcaatctctccaacttcttttcttccaacacctaagccacttgcaatttctaattccgtaggttctctggatagttccttttccaatctctctactactaaattgtatctgttaagcttgtccatagctcctttagaaatgggactattctttcttaactcatctatcatagctccttttattcttatagatgaatatgttgagaacttcatccccttactctggtcaaattttttcaaagcatccataagacctatcataccataccctactaaatcttcgtattcaatatatttactcttaccaattattactcttgaagctatatacttaacaagaggtatatatttttttattaaagcctctctatcatctacaatcccatctattgccatataaaaaatcctccctatctttttttcatgtgctttctcattatattaaaagtatagtttattatatgctctctaattctctcatctatatcatcatcaaattcaagtccacaaagatactccccatttacttctcttattgctctaacacaagtacttatcaaaaataacttttgatctccaataggcaaatttacaaaaatgctatcaccaacattaggcttttgttttattcgtatctttagtcccccaccacttaaatcaatcatgtagccatctgaaaattcttctgaagcttcttttaatttttctatttcagttttaactacatttttatttaaaactttatattttatactttcaattaaatcaactctgaaattttttcttctctgtaccctctttatattctcataacttggctttgatattaatattaattttattgcatcttcttttttcctctctataacagtagacgtaaaggaatagacttgattatcgtgataacaccaaatttctgtcatatcccctttatgcataatagcataggttccattagctactggtaaacttatagcaatgtatttctcctcaattccctgtatattacttttataaatttcattatctagtaccacttcacatttgtcattaatagctataaaactaaggtcacccataaccacaactccttacgaaaaaatcttaaataattttttaaataatccttcaattccaaggccattatccttagtagtggttcccatgagcttatttgctatatactgaatatccttagcagcataacaattgggattttcaacaacaaaaggtgtttgatttctaacagctttaactatccttgaatcctcagaaatactacctaaaaattctgtatctgcctttaaaaacttttttgcaacactttggaattttttataagtctccaaaccttccttattatccaccactctatttataactaccttagcataagactttatcttaaaatgaacaactgctttaaaaaggctatatgcgtctgtaagtgacgttggttcaggcgttgtcagaattataagttcttcacaacaggagataaatcctaaaacacttctatttactccagcacctgtatccattattatatagtcaaaattcccaatagaagcaagcttttttacaaaggcatttatttgatcctctgtaatatctttaaatttagtaatgccagagcctcctggcaagagcttaactccaaaagggccctccacaattgcatcttcaattttcatattattatatattacatcaaatacactatatttagatatacatccaagcaaaatatcatcattacccataccaacatctgcatcaaaaattagaacttttttattcatttgttgaagtgttatggataagttaactacgaaattactcttacctaccccgcctttaccagatgtgacagtaattattacaggcctctttatctcttctccagcgttttttttaagagccatatttctaagtctttcagcctggtctaacatacattatcctctcctagtactaagcttacaatttcgcctttagccattcttcttatgtcatcaggaacattctgtcctgtagtaacatagcttaaaggcttgtgagcataatttagtatattaattatagaaccataagttgtagtttcatcaagtttagtaattataacattttgaaaatcaagctgcctataaccatcaattatagcttctaaatccctatttttagtagttgcacttattacgaggtttatatttaagctatttgtcttacttacaaaagcccttagttctgatatttgcattttatttttgctgcttctgccagtagtatctactaaaattatatcacagttttgcatgctttttatagcctcatccatttcctttaatgtcaaaactactttaaatggaagattcatgatatccgcataggttctaagctgttctacagcacctattctataagtatcaacagttataagcccaactttctttttttcaataagagaaaacttacctgctaactttgcaatagttgtagttttaccaacacctgtaggccctacaaatgtaattatacctttctcctctgttttagaaatttctatatttttttctagggcactttttaattttaaatttaagtcaatgtcagatttgtcatccattatatttttgacaatctcttttatgtatccttcatttatatcagcttcctcaagctttaactctatttcagacttttcttcttgatcagcatttgaggaagaaatgttacctataagctttttcatttcttccatttccctaagaattctatcttccccactgctttttacatcttctaagacccttcttttttcgaccttagtagtttcctcatgttttttcattgccctttttaatgcttctacactctcatttaaatcagaattttcttctgtgtactggggcttagaatatatattttctctcttttttgtatcttttgaattatcaactgctgccgttacctctattagcttctttgaaaaaatccctaaaattccccgttttttaactttcctttgacttattataacagcgtcactgccaagatcatattttattttcgccattgcttcattcatactcttaacaatatatttctttaccaccattataaattcacaactccttcagttcttatctgtatatcatttggaatttcattaagtgaaagaactgcaacacctggaaataccatttcaataagttttctaaatgcaggtcttattttaggcgaaactaaaatagctggttgaccatcattaaaattaacagtacttacaacctgttttatagaattcaacaaattagttgtcacatcaggactaatggctgggaatgaaccttgtactgatgatttttgaatattgttagcaattaaattctcaacctctggagataaagttgcaacaaccatactattattttcatctacaagattactacaaatagttctacctaatgacattctaacatattcagttaaaagttcaatatcctttgtgtttcttgaattatccgctaagcactccattattgttaccatatccttaacaggtatcttttccttaagaaggttttgcagaattttttgaagttctcctatagttaatagatctggtataagttcttcaactacagctgagtacttttctttcattgaatccacaatttcttttacttcctgtcttcctaaaagctcgaaagaatgatcttttactgtttcagttaaatgagtgatcattactgttgtaggatcaactaccgtaagtccccttatttctgcatcttctctttgatctttattaatccacatagctggaagaccaaatgtaggctcaatagttcttataccttttatatcagagttttcattagctggatccatgcataaaagcatattaggcataagttcaccctttgatactattgtacctcttattttcacaacatattcattagttttaagttgaagattatctcttatccttataggttgaactactactcccatctctatggcgcattgtcttcttacagaggctattctctgaagcaaatctcctcctgaattttcgtctgcaagtgggatcaatccgtatccaatttctatttccattggttcaacagatatcagtttcattacgttctcaggttctctcttttccttctccataacctgcatattttgagtttctgcctcaataattttttgagacatttcgtctttaaataaaaggtaagctgagactcccattgctgtagcaagaattaaaaataccaaatgtggaaatcctggaattatagcaagggtaaaaagtacaacagatgctagagctaaaaccttaggaaaagctgtaacttgtcctaaaagttcatttccaagactttcattatttttacttcttgtaacaagtatacctgttgctacagatataagtaatgctggtacctgacttacaagaccatcaccgatagttagtattacatactgctgtgctgcctgggctatacttaggtttctcataagtactcccattataattccacctataatatttattgcacatattataagtgatgaaacagcatctccctttacaaacttagacgcaccatccatagctccaaagaaatctgcttcaagctgcaggttttttcttttggttttagcttcttcttcagtaatcagccccgcattaagatctgcatctattgtcatctgttttcctggcatagcatcaagagtaaatctagctgcaacctccgctactctacctgaaccattggttattacaacaaactgaactattataattatcaaaaatataattataccaacaacatagtttccaccaacaacaaagcttccaaaggcacttattatgtcccctgcatatccattaagtaaaataagccttgtagatgaaatattaagtgaaattctaaaaagtgtcgttactagtaacagtgttggaaacactgaaaattgaagtgcttccgtaataaacatagttagaagtattatgattactgacatagtaatattaaaagctataaaaaaatcaagcaccttagctggtagtggaacaatcatcataataactattcctacaatagcaagtgaaactatgacatctctattgtctttaacattaaattttaatctcctaccctcttccataattatcacccttgtttcttatttaatttatataccaaagctaaaatttcagccactgtttgatacatttcagcaggtatctgttcgtctacttcaacctttttaaatatcaaccttgctagtggcttgttttccattataggcacattgttttcttttgcaatttcttttattctaagtgccgttctatctgctcctttagctaccactgtaggagctttatcaactcccctctcatatttaattgcaactgaaatatgagtagggtttgtaattacaaccgtagcatcaggaaccttacttaacatcgttcttgttacgatttcacgcattctttgtcttcttttaccctttatttctgggtctccctctgcctgtttaaattcttctttaacctcatgctttgtcatcttcatgtcttttttatacttatacctgttatatacaaaatcaaatcctgcaattactatcattataagagctactattctgaaaatacttattacataacttaaatatgcctgaggaatatattgaaccattaaattattcagattagctatatcgccatagttagacataagaaatttgtacccaacaactgataatactgcaactactactaaatcctttaaaagatttactattgtagtcatagagaatattcttttaaaaccagaaataggatttagcttttttaaatcaggttttataggctcagttgttgttatccatccagtttgagctatattggctacgattccaacgaccattactggcactccaaacataaatataaatttaccagcattcagaattacaaatataataatccttcttaaatcaagctctgtaagattactgtgtatatatgattgaaaaaaagtttgcatcataacgccaagaccattaaagaatgtttgtccaccgagcgatataataaatgtaatagcaacaagtgttgcagcaagaggaacttccttacttctagcaacctggccttttttcctagcttcactcttcctcttaggggttgcttcttcagttttatccgaatctgcaaaaataagccctatgggaactaatttataaaatcctttatatatatcaggaagagatgaaaacgatgttattaaaacctttgctataagtggtaaaattatcataaggcaagtaagtccaagtagtatctttattggcatacctaatatcattacatttaattgaggcacagttctagacataagccccataactatatctgtaattaaaagcactaatacaactggtagtgctattttgaaacctataacaaagaactgtacaaatacattaaatgccaccatgacactttgatcatttataacaaatgtacccaacttaactgaattaaagctgcttacaagctcttttataactacttcatgtccacctatagaaaaaaataaaaccacagaaaacatatttaaaaatctttctatcaatgatgcattactttcacttgaaggatcataagctgtcatcatactgtatcctatttgaaagtctaaaaattgtccgcctattttaactcctaaaaacattaaattagcaaagaagccaagtataagtccagtcaaaatctcacatatacactgccatgtatatagaaaaccattatttaatgcactaacctgtgataaatttatatatggcattacgaaaaaagatatacacaatgataacattacctttacagtatttggaagcgactttggaaacataacctgtagtgctataaaaaatgcgaaaactcttaaaaacaccataaagagcgatgtaaagtatgcaatattcatattatcacacctaacgcgttatattagcaattacatcaaacatcctagtagttagccccatcatcatatggagcatccaacttccagccaaaaagccaactgctgcaatagctagaagttttggaagaaaagtaagtgtttgttcctgaatctgtgtagttgcttgaaatatacttataaaaagacctattattatagacactatgagcataggagcagaaacaataagacctgtagttattgcatccttcattattttaattatcatattctcactcattttaatcaccctccaaaacttaagacaagagatttaactataagataccatccatctaccattataaacaaaagaagtttaaatggcatagagaccataactggtggaagcatcatcatacccattgacataagaatacttgcaacaaccaaatctattataagaaatggtatatataataaaaatcctattgtaaatgcagtcttaagttcacttataataaacgctggaactatatcgtgaaaaggaactgtgtcctttgtaattttccctgactgattatctaaatcaataaataatttcaaatccttttgataggtttgcttgtacataaatgttctaagaggcttttccatttctaaaagagcctgctgctgacttattgacttgtttaaataaggctgaattgcatttttatttatttgtttatatgttggcatcataataaacatagttaaaaataaagccaagcctataagtacctgattaggtggtgactgctgtgttcccatagaagttcttaaaaatcccaatactactattattcttgtaaaacttgtcatcatcattattattgaaggaagtaaagtaataacagtaagtactaaaagaagttttatattatctacaaaatccttaggattgttagaattcgcattgtcaactgaaatattgactttaggtatctgtattgtacttgcagtatcaactggtgctgcatgagccctagctccaagaaaagcaaggaataccaaaaatacagcaagcatgataaaacttttctttttcatattattcttcctttttattcttaagtttgtttttaatacttaaaataaattcatttaaatttttatattcaggaatgcttttactttcatttaacatacaaagttcctcatcggtaagttctttaagaatctcaaccttaccttgagtactagaaagtacataagccttatcacccatttgagcaactaaaatgctattttccttagaaataggtgtcttctcaagtatttttaaaaacctaccattttgcatgttttgaagtttacttccaccatatttcaacgataaatatattaggaatataactagtggtaaaaatattattatttttagtagcataaaaaagatttccattgcaataccatcctaatttattctattattattgctgaataactaagtttgaaaaataaacattatcaatttgaccatttttaagatgagggtttattccttcttttatttcttttttcatttgatcaattcctgtaggagtaaaatcagctgctttcttacttctcaaaacattaactattatatctctcataattggtgttttaatgtcttccttcgtatcttcaagttcttctttaagttttgagtttttagaactatatccaactgcaactgtaacttttatatatttagctccatctgtatctgcaagattggttaaaatctcttcaaagctataggtattttcttcaacatttgcttcagtagtagttgctgcatttgttgctgttgtgtttgtcgatgttggagatttttttgaaaacacaaagaaatatgcaagtgctgctgctataaatactacaattattaccataagtagtattattatgatttttgactttcctccacctttttcccctttatctttctttttttcactcataatcactcgttccctcctatagtatacatatagtatacataatttttatgtctaatcctatgcttatttaaaggttccgctaactatttttttcttaaattctataattttatttataacctcatctatactctcttcaacaatatacttgttgccgtttataagcgttataactgtctccggtacctcttctattttttctattttttcatcattaagtatcaattcttttccattcataccagtaagatttatcattaactcacctctatatttttgaattatggaaacttgataaaaaaatttttatcaagtttcctttaatttgatactctaactatctcttaagatttactaaatcctgaagtatttcgtcacttgtagttattattttaccatttgcttgataagctctacttgcaactatcatatctgaaaattgttgagctaaatcaacatttgacatttcaagtgctccactatacatctttccataaccaccactgttatcttccttctttgctgaagaaatgaaagtaggatcaagtttattactgtaagcaccactacgtaccataggctgaccagaacttgctgaaggcttaacatagtttccaccttctttttcaagtcctcctgcatttgtaaatgaagacatagctatttgccctatagcagctgctgatccattatcaagatttgctgttataactccatcttgccctatagaaaatccttttacctttaattcctgtgttgaataaacagcatttccagatgcatcacgggttgctgttacctttgtaactgtaggtggtatttttaaggtatgaagatatctattatctgctcttaaatcaacatcatttgcatctacaaaggcaacgtctcctttttttattgtagctgtaccagatccagaaggatttttatctacagcggctacgattgatttatttaaatcgtctcctccttctgcagctatataagtagcagcattttcatcactaccagccattgttgtctcatcttgagctcctgatatacttacaaagttaccatatatattctttgttttatctgcactgtcctcatacaatgtatttcttcctaccatagaataccctaaaacttttctaccatccgcagtaaccaaatttccttcattgtctagattaaaagatccatctcttgtatatgaaatatctgtacctgatggtgttgaagttattgagtgatcagttgtagaaacgttaatgcattctgattcatcagccatatttgcaccagaagcaaccatgaagtacccatctccatccgtgattgcaacatccaaatttctacctgttgtattaacgcttccagaagctgtattagtgattattgctgaagaattaactccaagggtaatctgctctggattaacaccaccatagtttgctgttgctcctgaagctccctttatagtttcactaattgcatctgaaaaattaattgactgacttttgtaggctgttgtacttgagtttgctatattactacctactatatctaatttattttggttaactttaagaccacttatacctgaagtcattgctcttaacataaattctacctcctaatttttatatgataagcatagctttagttttgcttccttcattccacaaaacaagccccctataaaggtccagctataataaaaccacgctatctatattagtaaatacattccctttactactgcctttgtctacagcagtaactatagttctattttttatgctagcaaccaacgccacatccttgtaaaaaatcaaacagtcctttgctcctttatcgtgtgccttattgattccatcatttatctttttcatatcagcttcagtaaaatcaatattcctagattttagtctttcagcagcatgatgtgaaatagtaaattcattctgctttttaatactgctatctaaaatactttcaaagtcatttaaagagttatttgaagcttttatgttcgaagtattattcacataataattagctatatcttgtgtttgaaacaactttccatttacaactctataactcatatataatcacctgcacttaagctcttcatagataatctagtatacccttatgtcgaagaagaagtattacttgtagtactcgatgaacttgaggtatcgctctttgatgcaacttggtcatctatttgcttttgagttgtatcatatatattatccttaagagcagaaacgctattaacctgactataatcaaaagctattaccttatatacatcttgagttttatacataatgttgccatttgaatccttaacaacatttccatttgaatctgtttgtggtaccgtttctgtttcatactcaatgtttccctttgagtctctaactacatttccatttccatcaactttttcttgacgaacataattaccattactatcaattaatttaacatatatttgaatggtatccccatttttagttaccttttgaacttctcctctatatggcacgccatcagggtcatactgttttaaagtaaccgttcctcccataagtgatgatgcaccactaaaggtcatggttctgttcaaattagtcatttgttctaagtttgaaaattgagctaactgagctatatactgtgttgaatcctgctgacttgtagggtcctggtgagacatttccgcaataagtatttttaaaaatgcatcttgccctaatgtattacccgcattacgaactatttgggttccaccagcagttttactattttccgtaatagtgactgtacttaagtcattaagcggattagtagtatttgccattaaaacacctcctatgcaagcatatttaatttattaagagaactattgtctgatgaattatttattgcgtcatcactttcagtatctatttttatattcttattactgttatttttctgattttctttatttttctcgttagattctttatcttgtccagagaaaaaagtagtatcatcattatacacattcacagaaaaagcttgtatttttatattttgttcatttaagtttttattcatttcattgagatttgaatttaaaagattataagcatctttatttgaagttgtaagctctgccttcataactccagcctcagaagttagctttataataacttctccaagttctttaggattaatttttacagttaactctttgatgttattattctccataaacttaactgattttatcatatcctctacaaaagtaaccctatttgcagtcattacctttgcatctccttgaacttcaactgcactactagaaaattgattcataaaagcagtaacctttgaaaattgactttcagtgttgtcatcctttgatataaggtttttaagaaaattttcgctagaatctccactcttagcttgttcatttgtactatctgaatcataagaagcctttgtattttccttattgcttcctaaaacactactgccagcctgatccaacgttcctttatcttcaaaatcattatcaaatttagaagagctagaatttagagcatcactaccatttagttttttctttaatgaatcaataatgtctcttattaatttttctttctcagctaaagatgaattgtctgttccacttaatgcactatcaagagtttttaataaatctttaccagaattattttttagtagttctttaatatcatgcattaccttcattagcttatcctgcacttcatctgaaataccaagtgctttcatagctttttttaattcatcgtcactacaagcgccattacctttaatcaacatttcaagcatctgctgaataagtgacatatcagttttaccatctttaatatcctttaacaaatcctctaaatcgccattaagcttagacactatcttcttaatttctttttcatcagcatcatttgcctccgatacattactatgcttattagaagcagtgcttgttttatctgattttgaagttttatcgctgcttaaatttctgtttgaatacctatcattatcagattcattatcggaatcagtatctttttgattaacattttttgtatcatcattattttgtagagatttaacttttaaaacatcttcaaaagatgtattttttgaattgctactatctttagatttgaattcatacgaatctttttctgaaatcccaatacctttaacattaaccataaccattctctatcctcaccccctttcaatgttcctaataaagctatataaagctaattcatcattaactctctgctcttttaaattctcatttttctcaaattctaacttttgcttgtcttttaaaacttctacagtttttctttcgacctgcttttttataagaacatttcttttatcttcaactacttttttctgtttttcaagattatcactagcttcgtcaataagaacatttaatgcatttagataattttgtgttatcttttgttctattactgtaccagataatcttttaagggaatattcatgataattttcagtcatacttagtaagttcttctcaatttccttttttacatcctgagattttttaaactctattttactctcctcttccttttgaatccttagatccaaaagtttttgaagtctaaaaccaaatccagccataattcacttcctctactgtgttatattaaacatactttttagtgaatttatactttcctcaaaagatgatttttcttctataccctgttttagatagctaattattctatcattataatttatagctgcatcaaccttattattagtaccttttacataggctcctatatttataaggtcttcatttttcttatattctgcaagaagatcccttgcaagccctgctgcttttttatgatcactatcagcaatttctgacataagtctgctaacactacttaaaacatctatagccggatagtgattttgtgctgccaaatttcttgaaagaacaatatgtccatcaagtatacttctaaccgcatccgctataggttcattgaaatcatcaccatcaacaagcaccgtataaaaagctgtaattgagccagtctccgccattcccgaacgttccattagtcttgggagcatagcaaaaacagaaggtgtatatcctttagttgctggtggttcccctgtagctagtccaacttctctttgtgccatagcaaatcttgttacagaatccatcattaaaattacttttttgcctttgtctctaaaatattctgcaatagctgtagctgtaaatgcacctttaagtcttacaagcgccggtttatcagaagtagcacatactattactgatcttttcatgccttcttctcctagatctttttctataaaatctagaacttctcttcctctttcccctataagcgctattacatttacatcagcctttgcctctcttgcaatcatacctagtgttgtactcttaccaacaccacttcctgcaaatattccaattctctgtccttctccacaagtcaaaaacccatctattgctcttacaccagtctcaatagaatttttaattctgcgccttttaagtggatcaggtggttctctatcaagttgataaagaactccactttttacttcttctcctcttaatggagcgcctaaaccatctaaaaccttacctaaaagctcatcagaacatttgacagagagaggaattcctgtttgaacaactctacatccaggagatattccttcaagctcaccaagtggcatcaatattacacgcccctcgttaaagcctacaacttcgcattttattggcctatttctttcattatatattatgcatacttcaccaacaaatgcctttattccatcaacttcgattgtaagacctacaactttatttacaattccttcaacatattcagtcttacactcccttatttgacttatgactttgtcgaaattaatatctatcatataatcacctgaactattcagtttttaataaaacttcctttatcttttcaagagcgtcgtcaatactaactttaactttaccactatcactttcaattatagctgaaccttcatccatatatccatcatcaactacaaagaaatctcctctatatggaagagtacttttccaattatcaagtgactttctaatgccttcagaatggttactactacacttaattattattgttttgctctttttacatatctccaaagcttcataaatcatattatctatgccatccgcttctttaattctttctttgagtatatgctgagcaatttcgatggaaagactctttatttttgcttccatatcattaaagtattcttgaacttcaaatttagcactcttaatcatatttgctacattctgttctgcaagggactttagattttcaatctccatatttcccttaacaactgtttcattataagcatcttcatatcccttttttctgccctcttcaagcccctcatcataggcctttttataaaactctcttgattcctcaagtgctttatttttgatatattctgcttcatgtcttgccttttttataattgcttctccaataacattatagctttcagattcagctctttcacctttagaagtcctttcaaccttaaaattagctacagtaataacctgctttttcttttcatcaagtactctatcattatttataatattagagaataattgcatcttctccacctcttgaaattacgatttcaccagcatcatcaagtcttcttataacagagacgatcttttgttgagccttttcaacatctacaagtcttacaggtcctaagaattctatatcctccttaagtgcagctgaagctctcttagattggtttctataaatagcttctgcaacttcttcagaacatcctttaagtgccattccaagatctttattatcaacctctctaagaactctctgaattgctgcatcatcaagggtaataacatcttcgaatacaaacatagattctttgactttttctgcaagttctggattttccttttccaaaccttctgtaatgttcttttctgtagttctatcaacttgatttaatatatcaacaagagtcttaactcctcctataacagtaagatctgatcttactactgaagataatttactgttaagaaccttttctatttcctttatcaccataggtgaagtattgctcatatttgcaatcctataagccacgtcattttgaacttcctctggaagggaagacattatttgagcagctttatctgcttgaagataacataatatgagcgaaattgtctgaggatgctcattcattatgacattcaaaagctgatgagcatctgcctttctagcaattgcaaacggtctatactgttcagtttcttctgccactttttcaagaatttcttttgccctttggttacctaaagctttagcaagaagttctcttgcataatctattccaccctctactatataatctttggccttgttcatttctataaactcttgaagaacttcttgtttatattgatttttgacaccagaaatatttgctatctcataagttattctttgaatttctctttctggtagtttctttattatactagctgaagcttccggtccaagagtaatgaatagtatggcagccttttgaaccccggttaatttttgttccttaccagccatatactatcacctctcctcattagttaaccaagcttttacaatatcaaccacttgttctggcttagttgaagcatactttttgatttctttctcaatgtgagtctgttcatcttcctcaccctcaaaatcaattggtgcaaacttagtttttgactttttaatttcatccccaactactacatcaagattttgagtactatctaaatcttcatcaaattcttcttcatcagctgcttgttttcttcttcttatcataattacaacaaaagtaattatcgctaaagcaagaactccagctcctattgctattgccatgtacattttctgcttatttgcagcattttgagcatcttgcatctctttaagagcttttttagcctcagtttctgctgtgttatcaaaaggtaaaccttcaacacttatagtatctcctctttgttgattataaccaacagcattacttactacattagtaagagtagactgagtatctccattgatcttaccatccacaataactgatattgtaagtctccttacatctcctggagccttaactgttttgttagtctcactactaacatcataattagttgtaacatccttactactagaagtagagttactattattattagcaatagtgttagaattagtattattgtctaatgggcttgaagaagtactttgaggctgagaattagtgctttcctgactatgttgactaactatagtaggatttttaggatcattaggattacccttattatcataataagtttgactattagtctcctgtgcatcaaaattcaaatcagcattaatcttaaccttaacttttcccttaccataaatactttcaagagaatccaaagcctttttttcaagctcactttctacattagattccattttatttctattttccgcagaatctgtagtatcactgctgtcatcttttcctttactattatataaatccttactaagaagtgccatcttatcatcaacaacttgtacattttccttaggtagatttttaacacttccagaaactaaagatattattgcttttacttggtctttacttaaagtttccccagctttcatcttaactgttacagaagcacttgctggggttgaatctttaacaaatgcagaatcctcagacataactaaatgaactctagcgtcgctaatttcatcaaagttctttattgttctctcaagttcaccttgaagagctctttgatactcgacattaaattcagaatccgttgttccaaatttattagcactattgtcaaaaagttcaaatccagtacttccaccctttaaatttgtggcatactgaagtctaagtttgtcaacatctgctgccggaacgtaaatagtatttgtagaagaatcttctttatgcgcaatcttatcactgtcaagtttactaataactgttgctgcatcacttgaatccaattttgaaaataaaacagcatatttagttctagttgtagacactaaaaagactactaatgacgctataatagccacaacaattatcagaaaaactatcttctttctcttactaatttcgccccatttattccgcaagttttttaaactttccaatagttttttcatcaccagcactcccaactataactgcgttctatttaactcctgatatgcgtcaactagcttatttcgcatttgaaccgcaagttctagtgacaacttagcttcttctgttgacaacatcactttatgaacatcaacgtcgtctccctggataaaagcattggtagtgttatcagcatctatttgtttatcatttacctcttgtaacttctcatttagtatattgccaaaatccacactgtttgtaccattagcatcaccgcttgtctggttttcattaataacattagtatttgacgtattcttagtcaaaatacttttcatactatctggtataaattcatcaactctcataaatatttactccttatttaccaatttctaaagcttttgtatacattcccttttcatcattcattgcagttacattagcctcatacgctcttgtagaagccatcatatccgccatctcatttaaaatattaacattaggcatcgcaacatatccatcagcatttgcatcaggattaccaggatcatattccatcctaaatggggatttatcctcgtctattttaacagctctaacacctaaaggtttattctcatatttaccagtttctttattaaataaattctcaaaattatcttgaaaaactgctacttttcttctatatggtcccccatcagctgttcttgtggtggaaatattagctatattagaagatatagtatccattcttaatctttctgccgaaagaccacttgaacttatattgagtgaactaaaagaactcataaagattacctcccatttataacatttctctccatgttaattctgctgcttatctgatttataagtgtgtaatattcaagtgtattctgtgcatcatttgacatttctgaatcaatatcaacattatttccatcttcatttacactacttgctgtatcttgctttaactgaatatctccaaaagacgctccatcatttatatgtctagaatctgttctttccatcccaagattatccattgaattcttcaaattatcttcaaaactaacataatatctcttgtaatctttagtgtttacatttgctatattatttgatattgctttacctctctctgatgttgcatcaagtcccttactaagtaaaccgtaagtatattggttacttgatatactgctcacatccatcataattctctcctctcttttatagacttttataccctttattatttaattggacaaattttttcaaattccttttagaatttaaaaattaagtcgttttataaaaacgtgtaaaaaaaaatttaacacatgaaatcattatactatatttcagaacattctaaaaggttttataaaaatttttagataaattaaatagcaaactaaacacaatttgctatttaattgtcgaagcaagccaagacttggtttcagctattccttcttccaatgtataatgaggttcccatcccattaaattctttgctttagaatagttacatttcaacttcataatttcactttgaggatgaatatgctctacatggttaacagaaacttttttaccagctataaggttagcaagctcatttatagttatatcatttcctgtgcctgcatttattatttctccatcaacttcacttttatatcctgcattaactacaaaatcagcacagtcttttacaaacaaaagatctcttgtttgctttccagatccataaatatttataggcttattgtcaatgaaattcttcaggaatatagatacaactcctccttcaccattcgatttttgaaatggtccatatgtattaaacggtcttataaccacagccggaagcttatacgcattaaaataagaaagcaccatgttttcagctgctatcttacttcctccataaggtgatacgggttttacgctgtgctgttcatcaattccagtttctcctgaaatgtcataaaccatgcaagtactcataaatacaaccttgcatgggtaaacttcatcgttttcatctatattccatatacttccattcattttcccatgctgtccaaacatttgttttttagctctctcaaggatgttaaaggtacccactgtatcgttaaaaaaagttttctctggatcatcaatactctcttgcactacaatagatgctgcaagatgataaattatatcatacttatcctcgaaaattctatctaaatcatctttattttttatatctccttcgataaatttaaaattttcacctttaaattcctcaatgttttcaatacttccattagatagattatctaatgctgtaaccgtattcccatcatctaaaagcttcttaacaacccatcttccaataaatcctgcgcctccagttacaagtatattcaccctactcatctcctattcaaattttatttttggttatttttactcaatattgtaattaatgaaaagtatcactcataaacataatctgattaggcatttatgcctaatcagattatgagtaataacattatttacttcctaatactacttaatatatttaagatgtctttcggaagttgatttgcttgagcaagcattgcgtcaccagcgttcataagaacacccgttttagtatatgtaatcatttcatccgcaacatctgaatctctaatatcgctttctgcttgttgaactccctctgaaaagctatttaagttattataggtatcttcaaatctattttcgatagcgccatactgagctcttgcatctaaaacagttgaaagagcactatcaattgtagcaagattagcatttagagaatctgcttggagatttacattcctaatactacttgttacatttccatttgcatccttctgccctaaactttcagaacttaaatcataaaaagaaaactgtacagtctctcctacattatttcctatagtaatttcacttttttcattagaagccaaaagaggtttgccattaaagttagtatttttagtaatatcgtttattccattttttatttcgtcaatttcaagctgtatattctttttgtctgaatcagttttgctagaatctccagattcaagaacaagatctctcattctttgaagcatatctgatacattactcattccaccttctgctgtctgaaacatgctaatgccatcttgaacatttctagctgccatttgcattcctctaatttgcattctcattttttcacttttttctaaagctgctggaccgtcttttgcactatttatttttagtcctgaactaattctttctagagaagtagcctgctgcccttcaacacttttttgttcatagaaaagcgacaatgccgccatattatgatttatcctcactatatatcaactcccaaaatttttataaaatcttgaaaaaacttcctcaaaattatgctatcgattttattatcgttatattttttctagcctttagaaagtatatttcaatatttcataaactcctttgcagcctctattatattattatatagtataagatttctttcaaattttattttaagtttttcttcacttttcataccttttttttctctaaaattaggattaccaagtatatttattattgccggagacaaaagcacatttataaatttaaagctgctagccatactaaatatacactcattcgtcagattaaaattatgtgctaaaaaatccttatcactctcactttttcctccaaatgccaaataactattatactgttctactgcagaagtgcacatactgcttattacttttatattttgtctaattccatccagtttaatgcgcatattatcatcatccataagcacattattactttttattatattacttacagcttctgtattctttatactttcgccgaatttttctagtgcatccttaaatttaataagtggtgctccttctatatttgctccaccctctgtacaatttatgaagtccacatgtttttttacttgtataaattcctccattgccttcttataaaaataaagtgttctatcggtttttacctttcccccatacacatcatcaacatagaagaaattttttatgttactatttccaccaacattcaaatcacaagttacatcattagtatacgcaaaatcttgacctacaaatattatcctattacagccaatatattctgctaaagaagcacacacatgtgcaacagatcccccttcatacaagttatctatatccttctcaaaaaaatctttagaggcatcattgacccccgtatccgtgaaaaaaattttatctcccttatagttcttaattaccttgtaatttgtaaattcagagtaaattatgggtactgtacaatcaagggcatccttcataatttcaaacgcaggttcatcaggatctataacgcacacaaaatcaggccttattcccttatctaataaaagcttaagcgtccttcctcccgttataacgataaacttactttgataatccttcagtaaatctatatttttagaaagtgaggggcctgctgaaacaataactgccggcatacccttataaatatttttaaaatgatttattattgtacttttctgaatgaactttaaattattcatataggaactaaaaaaatgtcttgaatgaactatatgtgttcccatatttacaagtaaactattttgaatgtctatataacttttataaagattagatatttcttcatagtatgtatctgcataattagcaaaaacaccacactttgtattcgatatattgaattcatctagaaacaaactaagtattccatttaaatcttcttcattatataagtacaaataaattctatcatcatctattatcttgttcgcataatttaattttaaaaatctcgatataacatcttctcttggttctacaatcaaaattctcatttttttcaagttcatatttataagctttaaaatatgttctccgcatccaagtccaaatattacaaagtcactttctgtattttctatatttaatttttttataaatgaatttatgtcttcctgaacgttttctctatttccaatatacttattatctaacttaagtatatttttattatccaagctttcttcaataactgcattaatttctgaaatgtctctacatcccattacagtattaaacgttattatattcatcaaaacccctccatactaaatagttaaaaaaaagcaggacttctcccgctttataaattgctatttaagcttatcaacaagctttatggcttcatctacaactacatccatattcatatatctatattgcccaagccttcctaaaaaataagcattttctagattctctacttgcttcttatattctaaataaagcttttgatttttactctgaggtactggataataaggttcaccatcagaacatgaatattctcttactatagtagtgttataacatttttgccctgtaagatgtttaaattctgttattctagtaaaatcataatcattaggatagttaaccgtaccaaccttttgataataatcttggtttagagtttcaaattcaaagtttattgatctataaggcagtcttccaaatttataatcaaaaaactcatctgcacatccagtatatataagacttttatactgaatttcactttttataaatttataatctgtattaagcattatatgtatattttcatgattaagcatattttcaaacatctttgtatacccatcaagtggcagcccctgatatacattagtaaaatatctgtcatctctatttgttcttataggaattctagctgtaacttctttttctagctcttccggcataattccccactgcttttttgtgtagccttcaaagaacattttataaagctgagacccaaccttagtcactaccatatctctagcattatttatttcaatatccttttctcttactttatcaaaaaactcactaatagtatcattagaataatttgtaccataaagctggtttacagtatccacattaattggcataggtacaagtcttccatctacataagataaaaccttatgctgataaagataccatttagtaaatctagataagaactcccatacccttttgctatttgtgtgaaaaatatgagggccatatttatgtacgagtatgccattatcatcataataatcataggcattcccacctatatgatttcttttatccacaattaaaattttttttcccttttcagctaaaagccttgcagaaacagcccctgaaaatccacaaccaactattaaataatcaaacataatttcctcctataaaattcatttaaatatacgcacttaaaaaacttcattttttcttagctgctcttaatttaaaaatcaaaaaaggtactgatacaattccaaataagcaggtaaaaaatcctgatagtattttaaaaacaaaactcgaaagctccataatgtatattgagagcctatctctatctttaaattcagaaataacattacacattataattttatcactattaatagataatgcatacttaaaaacattaaaaaaacctgctcctgatatattggtaacaggaacaattactacatcaaattttatgttctcaatttctttaactttgtttccctttttaaaggattccttatacggatagacatatatgttatgtatattattatacttttcagctaattttactccatgttcatgagttagtatatctatttcatagtctttatacttcttctctatagcttttaaatttaaatccaactgctgaaagcttgctgagcgaactataagtaattttttcatgctgcaccttcctcacttaaggttatttataaaaggtaaatgaaacatttaagggaatccttagattttcctcaatgtacttatcaacaaccttcctttttccctttattttattaaaattcatgaaagcattccacattgcctttaaatatatattagttttttgctccattgaataataaaaacaatcatatataagttctatagttttctttaaagctgcttttgtagaataatttttccatacaagaaaaaaagcatttcttgtataataaaaaggcgccctccaggaagctctatttttaggtgaatacttatgatacgctataacatcagcaaaaaactttattttatatcccatatctaatattctaaaagctgtatcctgttcattccagtatagaaaaaattcctctggataaaaacccgcttttttaagtacttcagttctaacacctgctccagctccattaaaagccataatatactcatcagattcagctgctgtatcattactagtttcttctgtatcaattttcttaacctcatcataattatagtaatttctcacatcaaaggccaccataccaagcttatcatccttttgaaactttttgaccattcttttaatagaatttttttcagggaaggaatcatcatcaagtattactatgtactctcccgcagcacttttaaatccaacattatatgcctctattcctgcgtttttaggcatttttataagctttacctctttaaaatcttcctctattttttctacagttccatccgtagatccattatcaacaactattatctctaaagactcataatctatttttcttatattattaagactttcacatatttcatcttttctattccaacaaatacttacaatactaactaatggagtctccattttttacctcccgatattaaatatactatattattttatcgtataagtaaattgaaaattgataccaaacacaaccaaccttatattataaaaagtttgagctgttattaagcgcaaacttcctttatctacttattcaattttctgtttaatactctcattttacttaacaaattaggataccatatattcttcatcaaactatatgtattatcatagttttctatgtattttctatcatcccctgaaactattacattaaagaatttatccacataaatcaaattatttgaaagctcatttctcatatcaaatatatgattgcaaattttaattactgtctcatatttttttaagctttcactttttaaacttagtactttatattcctcaaactgctgcttaatattctttacattacctgaaatcaaatttatttcagtttcactgtttgtcgctttaatcttatttacaatatttctaagtacttctatattagaatctcctgtaagagctattttatttttattttcaattaactctccaaacctatctttaaccttttcaatttctaatattttatcctgactagcctttcctctaacgtcatttaatgcatcttctactgctgcaattatagttctagcactgctgtatttaccaatataattacaggaataaatcgcctgaaaaatttcatcaaatattctgagacaaaaatccttaattctattttcttcaatatacttagcaaaaaagcgaatcctattgcgccaaaaataatatgttccaaaagtatttgttttctgagctacccccattttatgccatacttttgattttccataggtcacaaccttgtatccagcttttttaaatctatatccccattctatatcatcccaatatataaaattatcttcatccattatgccaactcttcttagggcttcaatccttaccatcatagaacaagccggtacataatcacactcaaccacttctggaagttcaataaaatcaatgtaacctttgtaaaatgggttaatataaaaattttcaaaatcaattttcgctcccatttcttgaatcttatctctgttatccattgaatatatttttgaacctactacagcagtgtcgtcatttttttctaaatatctatatgaattgtttatagcctctttatctaaaataacgtcattgtctaaaagcatgacatacttatagtccttcttcaatacttcccttattcctgtattaaatccaccagatccgcctaagttttcagtattactaatcaacattactttatccttaaatttatcttttatagcttctactgagccgtcttctgatgcattatccaccacataaatatctaaatccctatatgatgaatttagaactgagtctatacagtttaatacatattcctttttattgtaattacaaattactatagataattctttcattttttattactcctatctgcagcattatacagtactcaaaaagtcctttatacatttcaaacccatgcttttcaaactgctcatcgcttcctcttttcccggttcagttgcaataaaaacataatcaaatttaatatgatttatatcttttggatgaagaattctaattttttcaaattcacctgttttaaatttatctacaaatgcaatacattgagatttctcaaaaaattcgtctaaaacctcttttgtaattttgcctccattacttgcaccccatactatgtatttaaagtctttcttgaactctctcttaaaaacatctattaattttatttttattccatcttttaaaccttcataattttgattatctactctagtctttgactcctcgtgcatcctaaaatatataagttcttcctttagcttatatattttaaatccgctttctatagctcttagccataaatctaaatcctctgatttaaaatcattgtatccttttagctctctcaatatatctttcctaaacattactgaaggatgtgctaaacaataccaataatttaatattttttctctattatcatcataaatatcaaattctatatttagcttattttcatttttttcttttatatcattagaaatattgcccaccacttttacctgtgttcccagtatatctatatctctgtggctttttagaaaagaaatttgtttttctattcttttgggtgcggaaatatcatcagcatccatccttgctatatattctccttttgccaatcgtatagcttcatttaacgagtacacaattcctttattttctcttgaaatcacatttattcttttatctaatttggcatattccttaattattttaaaagagttatctgtagagccatcatttattattataaattccaaatcactgtatgattgatttaaaatactttctatggactctttcagatatttttcactattataaactggcattacaacgcttaccttggccatactttaatatcaccccgaatacatatcgtgtttacttcacagcttagcttttatactagacttatatattccttgaattttttaagtccacaattttttaagaactcatcagcctcttctttacctggcaatgtggcaatgaagacataatcactatgtaatttcattaaatcctctggcttataaatcctacattcatcaacctctccttctttatatttatcaataaatccaattaaattaaatttatcagttgtgctctcaacaaccttttttacaagttttcctcccgtactagctccccaaattaagtaatcaactttgtcttttttattggtatcatttatataatctatctttgctttcatagtatattcaaccatcttaggattaaacatttccactgctgttttagatttattgtgaaccctatatttaattaagcattcatccattctcactatcttatatccatttcttatagcccttaaccacaaatcataatcctctgcagtatcatattcttttctatatcctcttaattttacgatactatcctttttaaacatgactgaaggatgaggtatagcacatgaagttaaaaaaacctgttctatattttgtgaatcaaattttattgaaaatgcactattataaattgttttttgcttctcatctatatctccaaaagcctctattctagtacctaatatatctacatctttgtttaattctaaaaactcaaattgtttttcgattctattattaatggatatatcatccgcatccattcttgctatgtattttcctctagctatgtttataccttcatttaatgaatcgacaagtcccctatgttctcttgaaatcacaataattctgttgtctttattagcgtagctagatattatgttataagattcatcagtagaaccatcatcaactattataaactcaaaatcattataggtctgatctaaaatactttctatagcttctgctaaatacctctcactattatatactggcattactattgatactttaggatacaccttcatctaaacactctccttaatattctttagcataatactaaaaaatcttttattggaacaaaattattctttgtcaagattcctttagcttctttacatcctggtaaagtagctatgaatacataatcaactttcattttactcaaatcttctggataaaatatatctacaccctcaaattttcctgttttaaacttatcaatatatccatttagcttagcatttggaaaaacttcttttatcttctcatatgctattttgcccccattgctggctccccaaataacataactaaaatctttaagcttaagtttttcctttacatactcaagcctggattgaattatatctcttatactactaaaaccttcagcatccctatgtatcttagaatcattatgcaaacgaattttcataagtttttcttctaacatagctattttatatcccttagctatagcccttagccataaattataatcttcggttcttttatagtttaagttatacccacctagagccttaagaacactcattttcatcataactgaaggatgtgcaatataacaattctccaaaaataagctttcaatgctttcagaattatttaagtcaacattgtaccagtgctctctttcaagtttttgttctctactaacatctccaaaagcttctaccttgcacgctagtatatctacatctttatttttattaagatattctatttgtctttcaaacctttcaggaagagctatatcgtccgcatccattcttgctacataacttccttttgctctatcgattccctcatttagagaatacaccattcccatgttgttgtcccttgatactacaactattctattatcgtcatttgcatatttatttattatatctattgatttatcatttgaaccatcatttacaataataaattcaaaatctctatacgtttgttttagtatgctttctatagattcttctaaatatttttcacaattgtaaacaggcattataacacttatcaattacttcaactccttcgcttgtgaatctttaaataaaattatggaaataaaactaaataacttaaatgattttttgataaaaattgctcagcctcatatcttcctggagaggtagcaacaaaaacataatctacgttaagttcttttaaatcttccgaagtgtgtatgtcatatccatcaaatttaccttttttatatttatctataaaagccactaaattaaatttaggcagtgcttcatctataattagcttagcaatttttccagcattactagctccccaaatagcataattcatggaattttcattattcaatagagtattaatttgctccttaactcctacaaaaaatttttcaaaaactatataatcataaatattaattttttttactatattttcatgtactttatcccaaaactcactattagaatctaaggaatatgttttttccaccataaattcattgatgcttttgttgtatctctcaaaaatcatgcatgcaattttttcaccattactagtatcatcttttaaagtactataaaggtatggtatctttaagcttaaagcagtatcatcaactaaaggtatcttactctctgaatgaaatattctaacattgcttttcatcactgtattattaaattcttcatttttgttacttacgccatcatatttaataaaatctacatttatgtcattctgtgagcatatctcgtatacatctttaaattcatctctatttagacctaatatatatacattaagtttaaaaccatagtttttcattagaagagcgtaccttaaaatgtcacttttcctatatctaaaatcacgtgaaagtataaaacctatagtttccttttgaagaaaagcatgaatccttaaagcttctattactgatttgaatttatatatttgagattctgtagaatgttttttcattatttgttcttttgcattattaaatattaattctctttcattaatattcatgcctattatcttccttatttttttagctaattcacctttttcatttttaaatttaaatccgtttacaccatcttctatagtttcatatggctttacattagaatacacaccaatcgctccacacacagcagcctcaatgtatttagttagtccttttgccaatttaggccctacattgaataaaggagatacaactatatcaaagttttcttcacttaacctattcatgtattcataataacttgttgtgaaaccttccgtgtatactttactatgcttgataccgcttatttcctcaggtatatacccccaaaaatagaattctactttttctctaaattcatttgatatctctaaaaagtcttcccaaaaaaactttatctccgctcttcttgaatctgtaccgataaatgctattttaaaaacactatcatttttagaaatatatctttttatatatctagtcatgacggtgagcttcagctccattatcctatcattatataatctcactgaatcagaaatttgaggactatagcttactacagcatctgcattttttagttgatactctaattccttataaatagatgttcctggtactgaaagctcaaattttttgtttgatgcttcagctgaagatagatccttatattcatctttgagcttataaaaatttaataaatcatcatctatccaatatgatacaggtatattcattttcttaagctttactaaaaaatgattagttgcaaaatcatatgttctatgaaaaattgcagcatcaatattttccaaaaattcttcttttaattgtgaagatggtatataaatcatattgtattcatcattcaatatcttgataaaattagtaatcataatatctaacgatgtatcaaattcaccttttacaactaataagtttttcttcaattttgacactgatgtttctttatcataatctctttttatattcttataccaaggcaatatgcactttgttaatatttcttgtctgaaattttcaccatttattattcctatatcatcaactatataatcattaactttatctaactttaggcaatcactcttatttacatattgtacatttctaaatactcttaaattaaaattatctatgtagatattattataaacttttgaaaagctttcatttgttaccacaaccttatctacataaatgaattttattttagaagctaatctcaataaaaaatcccaaaaaaaagtttgtttaagcatcacactgcaatccataatttcatatttttttataatactagcattatgcaaaattgcattattgggaataatattatcaccataaattaaatcactgtatttaaatgaatttcccatgacatagttactatctttaccattttgaagctcactttttccgtaaaccaaacactcaccatggtatttttcaatttctttaataagttcttttaagtaactactatctacataggattcattaaattgatatgttatgtattctcctctaacatagtttagtgcttgattaatacgaagagctgccaaacctgaccgattattattatgtacataaactattctattatctttattaatataatcttttatctttgtataaagtaactcatcatcctgaccgtcatcaactactattaattcaaaattcctatattcttgatttaatatgagacttatagatttatccagtttattgtaatcttttatatttataaggcataaaataatacttacattaggactctctattaaattccttgacctttctatagaaaaatcacttacaaaatcttttacctttatcatcaaatagctctccttattttgaaccgtcttactctaacatatgctttaatcaattattgataaaatactcttgcatgttataagacatttttttattaaattatggcaaatttattcaatatgtatattatcgttacgcatatatgtttatttatatgtcttttaatgtattattataaataaataataaaaaaaagactattcataatacttcatatctatgaacagtctataaaaaacattattagcctttaatctgtaaacaaattctcctttttatcaccattgtatattttcacaatattgattcccgatgtaatctcatttaaatacttgaatatatcttcctcatattcatagctagaaattataatcctatctaaattaagctcatctatttcctttggtgaatgtataatgcctcctaaatactctgtcccccactttaaagagttagaatcaaaataatatgtattaaactttatatctcctattaattttttatagtattttattaagtttgtagtgtgatcgcctgaaccatatattcctatattttttcccacagcattcttaaaaattactgataaaacatccgctttctccttataattaaatctataaaagagatcatccattttcttgtttgtatcttttccatccttcaatacaattttaaatatatcatttaacctgttttcatatgtatgctcttttatagttctaatatatccagcatttgctatagttcttcttttttcctcattaattagaaaatactttattttatcaaccatatcatcaaaagaagaatatacaactacctctttacctatttcataatagtgactgagcccttccacatcactagtcaaaataaatgccccacaggctgggacctcaaaatttcttcctttaatttgctgtggtgcatctaaatgtgatgagtttgataagttcaagttgattttactactattaaaaacatcaatcattgaatcttgagatattcttgaactatttggatccttctcattccatccatatccaaaacatgctacttctattcctttttgttttagtttattaattatttctcgcctattactatgtggctgtcctacaaaggatacatcatatttaaacggtatatctcttttaaaatagttgtattgattacaagcccactgagaaaaaattatattttcatatcctaattctttatacttaactattgcctttttataagtagtaacacagtaatcaaaacaccagcaccattttattgatgttgattcaaacctccattgatcgtcacaaaaccaatttactaatattgttttggtgttgttttttatatacaaaaaagtttctttttttatctgatcttcatacaatatattaagtaaaatatccggcttttctttctcaattaattttattaaattattattattatcctctctttttttcttatctccaaaatcacaaatatcaaaaaataataactcaataccatccatcttaattaacgttttataaaaattttcatactcaaaactatatccacgtgatttatcattataatcatattttaaacaagtcagtattacttttaacactttcacaccttctaactatttcctctttccataagaactaattttgctgtttctgttctcataaagagttttacattattttatcaagaattgattctaattttttcaacctaatttcatcaacaaattggttatttcctatgtaaaatccattatcatgaataagattagcgtttttaaattcattttcattatgatatttttttaaaaaaggctgtcgtaaaagattaccactaattataggccttgtttctacacctaattcatttagctttttttcaacaatttcccttaatcttttttccttaaatataaatggcaaagctaatgaagaagtcccttcaacttttatggtaattaatttatcttcatattttgtgcatgtatcaaaaaacatattgtaatttttatctctaatttcaatgaatgcatctaagttttttatttgtcttagccctaaaaatgcatttatttctgtacttctaacattaaaaccatccgttaaaaataaaaatttaaaatcaatgtctttatatttatttttatagtattcatggtatttaataggaagttctctagctaaaccatgtgatcttttaagaagacaaagcttatagaattcttcattattagtagaaatcattcctccctcaatagtcgtcatgtgatgcccccaataaaaactaaaggtacctcctaaaccaaaatttccaactttaatgtttttatattttgctccatgactctcacagcagtcttcaagtattactatatctttttctccaattacattttttattttctccatattagctggaaaacccaataaatgcgttatgaaaatagcttttgttttatctgttattttcttcttaagttcttcataatcaaaagataaatcctctaagtttacatcaacaaatacaggtttcaatccacattgaagtatgggtgatatatttgtaacccaagtaactgcaggtactataacttcagacgtattatctaagttatagtaatccttaactgcacttaaaagaactaaattagctgagcttccagaattaacaaaaacgctgtacttacatccctgccattttgaccattcagcttcaaattcctttactttactcccctgcgtaagtctatctgctgttttaataaattctgctaagctttcaatttcttcttttactaatgcattttcttgaagtttccatttcatattaacagctcctatctaacaattatttaaataccacctatatgtttttgtaattccttcatcaagttcaactttataatgccatcctaaactattaattttagaaacatccataacctttctaaacattccatctggcttactcttatcaaaaattatatttcctttaaatccaactacatcttttattttataagctaaatcttttattttaatatccttgccacaacctatatttaaaaaacccttcactttttcgccatgttccatcagaaaaataattccatcagccaaatcctctatatatgtaaattctctatactgttctccacttccccatatggatatttcctgagacccggaaacctttgcctcatgaaaccttcttattaatgccgccataacatgagaagttttcaaatcaaaattatctctcataccatacaaatttgaaggcatagcacttatgtaatttaatccatactgcttactataatattcgcacatctttagccctgatatcttagctatagcataaccttcattagttggctccaaatatcctgaaagcagatattcttctttcaaaggctgtggtgcttctttaggatatatacaagaactccctaaaaatagtaaattttcaattcctacctcaaaagaattttttatcacattatattctattattaggttatccataagaaagtccacaggattcgaaatattcgcttgtattccaccaacctttgcagctgataatactacataatcaggcttttcttcttcaaggaacttcttaacactttcttggtgcatcaaatcaagttctttatgagttctcactacaacatttttatatcctctacgctctaaatttcttaatatggcagaaccaacaaaaccagtatgacctgctatatatattttgctatcttccttcatattatgctccttccttatgttaacagttctctcaccctatctacattagttatacgtgttttcttcaagtcctcctcaaccatcatgtaaacaagttcctcaaaattcactttgcgcctccacccaagttccctttcagccattgatggatctcctaaaagaagttcaacctcagttggcctgaaatatctagggtttacatccacaagtgttttacctgtttttaagtctattcccttttcctcaattccctgcccaatccattttatctttattcctgcaaatttaaaggctttttctacaaattcacgtacagtatgagtttcccctgttgcaattacataatctttaggtgtgtctttctgaagcattaaccacatagcttctacataatcacctgcatatccccagtcacgtttagcatttaagtttcccagtgaaactttatcttggtttccttctataatatttgcaatcgccctagttatctttcttgttacaaaagtttctcctcttcttggggattcatgattaaaaagaacaccattgcaagcgaaaataccatatgcttccctataatttacagtaatccaatatgcataaagcttagctgctgcatacgggcttctaggataaaatggagttttttcactttgaggcgctgttcctggcattccaccaaaaagttctgatgtagacgcttgataaaacttacacttaattcctaattcctttatggcatctaaaaatcttaaagtccctactgcatcagtttctactgtatactcaggaacctcaaatgaaacttgaacatggctttgagcagctaaattgtatatttcagttggctgaaccttctctaatagcctgttaatattacttgaatctgttaaatctccatggtgaagaaataataacttattacctatctttggatcttcaaacaaataatctattcttttggtattaaaagagctggcacgtcttattatcccatgaacctcataacccttttttaataaaaactctgttaaataagacccatcctgcccagttattccggttataatagcttttttcaaatcaattcctccttagttaagctttataaatttatttatttgcgttaatattattttcaaattagtatttatttattataaaatttaaattgcgtatttttttctgcattttaaaacttttttcttagttaggacattatgaattttatatatacgttattgctactaaaatttatttatatatctcttctacattttcatagactgtaaaataaataataaaaaagctgcttatgacaccttaatttgtcataagcagcttccttattatttatttttttgatttttatactgacctaacttaccatttaacatgtttattttacttttaaaaactggataccatgtgcttttcagtaaattatatgtataatcataattacatgcatattctctatcactctcagacaatattacattaaaaaatctatcagtatataatatatcctttttatctctaattagtttctcaaatctatcttcaattttttcaagctcaagtattttattttccaatatagttacggtaatatacagcctgcataacctcatcaaatattttaaaataaaatctctctattttgatatgttgaatcagtaaaattattatctgatataaaaagactccagttctgatatgttcgcctgataattgattctatagcatactttatacgctttcaccattatacacatgcataccaataaaaattttatgttcatcttattcctttccattattgatatccgtatatatatattataattgctatttaacttagcttttttctttttaatatataaatctcttacctgttactttgtgctaaatataagaggtttgttcttttcataatcataacatgtgaaaatatcattgtttatatttatatctggaatcttttttatttctacatattatatctattatccatgcacccatatataatatagtatttatgactcaagttactatatgaaacttaagcatagcatgctaataaaaatatatttcattagcataccataacaataatttgctagttgttaaactctaatatcgatattatttcccctattaggatccatagcttctatcatatctgccgtattttctccattttgtttacaattattcattgccattttaaatacagcaagatttgcagcttcatttaccttttcattactattaattgttgccaaaagcgctatatccataaaatccctccttatacaatttaattatcgttataacatattttatctttataatcaaattgtttcacatatgctataatcatatgtttgaattattcgataatattaatagttttgtacttaggaggagattcaatgtataaatgtttaatttggggagttagtgatgaatacactatggcgtatgataaactgttatttgaaatattaaagaaaaatttatccatcgaagcactaatatcaaaggataaatacgccgaatatattgacggaaagaaggtaatagataaaacagaaatatcaaattatcaatttgactacataataatctttaataaggagagatactcagatattaaaaatgaggcccttgaactaggtataccagaaagaaaaatactaaatggtaaggttttttttacttctaattttgattttaaaagatactgcaaattaatcgaaaaccctattactattatttctaataattgttggggtggaaaaataagtaatcatctaggattaaagtttaattcaccattcattaatttattcttagaacttgatgattatatgaaatttttagagaatatggattattacttagatcaagaattacaagttgacgatgagggagatgtctactcatgtgatatacccaaaggctcattaggctcaggtgataacaaaattataataaattttaatcataatgcatcattcgaagaggcaaaaaatgattgggaaagaagaaaaaaaagaataaatagaaaaaatttatttataaaaatgactctaccggcaaataatgaagaactcgtaaaaaggtttgataatttaccatataaaaataaagtttgtttttatcctagacctatgaagtataaatccattgtattctgtcctcgttacatttggaaatgcaaaaatatggctagaaaaacatcgaattacgacttagtttattttgtgatggatacaaattggttacaaaaatcatgtgatattttaaaaatgctttgtggtgaagatgattttattcgtgagaaataaactattatatatgtaaacaaaagtggtattgcactaatcttagagcagcaccactttttatattaatggaataactttttaattctatactctaacatcaatactatttaccctatctcgggttcatagcttctatcatatccttcgtattttatattttccttataattactcattgccatttcaaatacagcaagatttgcaacttaatttacctttactttcaaatcctttcactgcactttcatataaaattttaagctttaatctaaatagtaatattttatttcatttaacgattatatgtaaaattattctatagtattcataagtttatttcacgtatactataattatatattaaatttattcgataatattaatagttttgtaagtaggaggagataaaatgtacaaatgcttaatttggggagttaatgatgaatacacattggcatacgacaaactattatttgaaatatcaaaaggaaatttatccattgaagcactaatatcaaaagataaatacgctaaatatattgacggaaaggaagtaatagataaaacagaaatatcaaattatgaatttgactatataataatattcaataaagaaagatactcagatattaaaaatgaggctcttgaactaggcataccagaaaggaaaatattaaacggtaagttttttttcatttctaattttgattttaaaagatattgcaaactaattgaaaaccccattactataatatctgatgactgttggggagggcttgtaagcagctatttaggatttaaatttaattctccttttattaatttttatatacataacgatgattatataaaatttttagaaaatatggattactatttagaacaagaattaaaggttgagcaggaaggaaacgtatattcatgtactatgccaaaaggttctttaggcacaggagataacaaaattatattaaactttaaccatcaagcttcatttgcagaggcaaaaaacgattgggatgaaagaaaaactagaataaataaaaaaaatctattcgtaaaaatgttgataaaagacgataatgagaaacttgtaaaaagatttgataatttaccatacaaaaataaagtttgttttcatcctaagcctatgaaatataaatcagttgcattttttcctcgttacatttggaggtgcataaattatgctgcgcgaacatcaaacagtaatttggaacaatatacaatggatatgagttggttagaaaaatcgtgtgatattttaaaaatgctttgtggtgaagaagattttattcgcgagaaataaaatcttatacatttaaataatccattttttacttgtaatataaaatccactggtgaaaccagtggattttatatttagactctattaaactgtgtacctacaccatatctagtattttctcaactattctttgagttcccatgccatcaataatcgattgagaagtcatggaaacattttttcttctattataatcattacttaaactatttatttcttctagtaccttttctcttgttaattcattgtgccaaccaagattttttattatcttaagagcatcaaatttttctgctgccttgctttgattttcagctaccgtaatcgaaagagacggaacacctacgctacaaagctcatatagtgtacttcctgcagctgatatacatgcatcacattttttcattaattccttcatatttgcattataataaaaatttatattttttaactcctcataggtttttaatttctctacataaatgtcatcaaaagaggaaccaacaactacatgaaaattgtaattttcctgtttcaaataataaaggagcttaagcgtcaacaaaaatggatctgcacctccggttgtaatcattacatcacgaacttttcttcttattatttttgctcctaaatctttaaattcatctctcagcattacgtatctacaccctaaaagaagtgacttattacctgctgcatcatactttaaattatcagcatttatattttgatttataatcatgtcaacatctttaaaatcgtaaaggcacatatcatctatgtatatggtcttatgaaacatttcactagtttttttaaaatattcttcatttacatcataactgtccgttattaatatatcgcctttaatttcgtataaatcttccaccatattattttctcttacaatctttaccttaaatccactggataaaattttgtggataccctttgcatattttccattaacactagtcttcctgtcctcattttcagttttacaaacatatataacctcaaaatatttattaagttctcttgctaaggtaagggttctcataatatgacccatacctatatccctgcctccatcggctctgattaaaatcctcaattataccacacctttttaattattattctagtaagttccagtccaaaggtgtaccctttttaacatctactctggcctttttcccaattacctcttctatatactttgtttttaatccaaatgctggtcttatactcttaacattttcttttgtaaatgtctcgcctttttttatatcttttacaacaaacaaagaccttgaatgttgtctgctgtttttttgtttttctgtaagttcatatgtgacttttcctaaagccttttctacttcccttatgcttttaaccatggctgaaaactcttctggctccattgagaaagcagaatctggtcctccatcacttcttttaagtgtaaaatgcttttctattacagttgctcctaatgcaacagctgctgtagcaacagaatatcccatagtatgatcagataatcctacgctgcagttaaatgcttctctcatattgggaatagtcttaagattaatatcctctaacggagatgggtatgagctgctgcactttagcagtataacattttcatttccttgccttctgcaggcggccacagcttcgtaaatttcccccatttctgcaattcctgttgacattataacaggtttaccctttgaagctatatattcaataaacggtatatccgtaagctcaaatgaagctaccttgtaagctggcacctccattttttctaaaaaatctacagaagtattatcaaaaggagatgaaaaacatataagtccctcttcttcagctatctcttttaacttaggttgccactgccatggtgtatatgcctcttcataaagtttgtgaagggttgtaccgtcccatatggttccctgctttatttgaaaatactcattatctgaatcaaatgttatagtatcaggtgtataggtttgaagctttatagcatctgctcctgaccttttagctgcttttattatttctaccgctctatcaaaatcctgattatgatttgcagacatttctgctattataaaagttctttgtccttcacctattttttttcctccaatgtctatgactttattcattttttccctcctttagcttttaaaaaaacagcttactattttctataatttctaagtttcttttaagttctgcttgtgtatctaaaagcatgtttgctctattttttgctttttcagacatgagcttatagtaatttttatcttttatgaattttactaaattatcggccatttcttttaaatttgaagagcaaaattcttctcctgcgcacacagcggtgtctccatagtttaacgaaatcactggaagtcccttatacatagcctccgctgccgatgtttgtccgcctacccttggtggatttacatataaatcacatacttcgcacacagcaagcatatcttcttgaaagcctaaaaatgtagagtgcttagaaaacaactgatttcttttgataatttcataatacttactgaaatatcctgcaaacacaaaatgtcctccataattaactgcatcttttaaagcgtcaataaactcttcagtaatctctaaatccaatcttactcctacaattaaaattagaaatttatcctgtggaagcttcaaatcttctctagtataatgtttactttgctctttaaatgcaaatgtaaaattactttctatagcatgctcattagttttaccaagcacctttaaaagatttatatcctcttcagttttcctttttcccattaatgcgaactgtgattcagttattggtatccccatcactgttgcttcagttattacaggaactattttgctgcataaatcagatattatgtttcctcctcctatatttaaaataaaatacggcttttctttatttacaaaatctattatatttataatttcgttcaaatctggcattatgcccctacattgataaaacttcattttacagtctttatactgaaattccttatcaccatcatactcatttaatatattaggtgggcttatatcatagaacggaataacacctttataagtaagcatatccttagtatttattagtatagctcttttattcattgattttattaatgtatagcatctgtccaacgccgtttttgttggtccatgccctaaagaaagaaattgtgaaaccgtaactattacaaaatctttatttctctcatttttataaatgcgttttagcttataaggaattatttctttaaatccccttaaaatattgctatataattttcttaataaaattgatgtagtactatcccctttactttcatttaaaaactcaagcctaataagttgataaaaaataaaatatttttcgttacaagaaagctttctactattaatagcgcatttcaatatattatttatataggtattacttctattcattctcattataattgaattagcaaaaatgtaaacatattcatcaaaggatactgttagactttctaattgctttatatagaactttttttgaaagtgtttaagcttaaaatactcatcttttatatcagtcgcaagcttaaaaaaagcctcatagttttccataaaacattttgttgacttcgatatattttttaaagcttctataaatttatccaaagcaaaattgctatttataaatatagtattatagtaattaattttttcatttttactgccattatctaaccttattatgttcttctctccatcatagggttcaaacatatagtacttatccttgaaatagtaatatctttggaatttatcttctttggcctctattaatatttcttttgtatcctctaatttttttacattttctccacaaatatcatcaataaatggattttcattagaagttatgaaaatattttttgaaattttataatctatttttttatttataagcagatttaaatatatctcatctaattgaacattataacgagcttcactgctttcataatatataaaattagagaaaaccctattatataatttatatgttaaaataaaaagttcttttatattggataaaaaataaaacctgttttcttcaatatcatcttcaaagaaaacatccataacatttaaaacattatgaggttttatactattttcatttataccattgaaaacatgtatctcaaaaccatccttttcaaaactctgaatacaagcattaaacttttcatcctttgtttcttcaataaaacacaataatatatttttcataatattaaacactgccaagcagcattgttttcaactcccctatttttcaaacatatacagcatcatcgtaccttaacatggttaactcctcaaaatcatctagcggctctacctttaaatcattactaatatcttttaaatatcttccataatctcctcctgctttaaaggaaagcggtactcctcctccaaaacgaggatttatttctataaaatatatctcccctagattatccacaatacattgtatagtaagtggtccaattaaattttccccatttcttgaagctgtgttttggagcttactgcataaatccttaactgcttctataattttttcattctttaccgttctacttttagaaacttcacctgaacgtacttctaacctttctcttggtattgcaaatataacatttcctttaagatcacaaagggtatctatagtatattccttcccttctataaactgctgaactacaggattttcaacgtattcaaggaaaaattccagctgccttttattgttaaccttaaatacactgctgctgcccataccatcaaatggttttacaataagtggatattctattacacttggaatttcatctcttaaatatgtgataggacactttacttgattttctttaaaaaattcataggatttccacttatcgttgcaaatctcaattatagtttttccgcttaatagaagctctgtgccaacttttttaagctcctgtctatatgaacaaagatctagaaattccctttcaaaaagaggaataagaaaatctatattttcatttctgcatattcttataatatcttcaatatatcccggctcgttatatttttttaccttataaaaaccatccacaaatttagatgccggcgctaaacttgaaatatcacacccatatatttttgcattttctttcaaacattttataagctgtactctctttccaacagctgtcaaaagtatgttcatttcaaactctcctatttaaacttctttttgttttatatcattattaatttgtgctatttcactatttctatcaaggtaattaattacattttttgaagaaacaaattcatcgttaaaatgctcgtatatatttttaactaactcaaagtcctctttagtatcaacacaaagtctataatcctttgaataaaactcgtctccttttacgtaaccaaccttaaattcattaggatgcttatacatataaagcgttacatgttctttatacatgtctgcctcttcttttggaattttccctccatttattaagctatttactgttttaagtgccttcattgaaaagatttcaacatcaaagccccttacaaaggtattaggaacatctaaccttacataatcgtaatcactgcttaaaaacttagtcactacattatcaactattataggatcaattaaaggacaatctcctgtaacccttattactgcgtcctcaatattcgctccgtatttttccgctgcttgttcgtacctttttaaaacatttgcctctgaacctttaaatacatcatatccatattcttcacagctttcaacaagaggagtttccctttccatcgatgaagttgcaaggacaattttatctatgtattttgatttctttaatctatcaagagtatatataaccattggcttttttaagataggttttataacttttccctgaagcctttctgaacccattctagcttgtactatgcaaaagatttttcccatactatcaccctctatatattcttaattatattaggaagctccagcagactcttaatagaagtatctgcttcatatccctttttagcatttaaactcatattgtcaccaaattctcttattattcttatagtatataaccctaccttccttgcacctataaaatctttgttaggattatcaccaacataaacagcctcttttgcctcacatttaagagcttttattatttctttaaaagcaaactcatttggcttccagaactcaaatccaaaatcatctgttactattattttatcaaagtaatttttgattcccaaactatttattttgttccactgtactgatgcctttccatctgttattattcccagtttatatttatctttaaaacaatctaatatttctttagcatcagagtaaactgtaagccttgacttactattcctatatatttcaactagcctttctacatcttcattaaatttatacctatcacaaataatattaaatatctttcctcttccatatgcttttaatatatctaatatttcacttaaaagtttatctttatccatattgtatttatttgaaatataggttgcaacacacctaaaaccttcctttacaaaatccatctcgttatataaagtatcatctaaatcaaatacaaccgcctttattattttaaacgcctcctacttttctaataattctatcaaccctatatctgttgaaaatagaaaggctacctttcgattatcaatggctggagctatttctgcttttttgaaaagagtatatcctatttgtgacatttcttcaatagacttttgtatgtcctcaacttcataacatatatgataaggtgtacttcctttttttattgttttattgattggtgaatcttctccatctggagctactagttcaaccctgtacccaccatttataacaaattgtatatacacctttctaacttcatctctgacaacttcgctctcttcaacatatccaagtcttttaaactttttaagtgccgaatctatattctttacagcataccctatatggtgtactttcactctaaagcctcctacttataagaatttttctcaacaatgttcatcatgtcttttaatcgaacttcataattatgatatttttttaccttttcatacccgctttcagctattctcactctttcatcttcatggcatatataatatttaattatatcactaaggtccttaaaatccctgtatacaaccatgtccttaccatctacaaaaaatttttctaaatcctttttatagctgcttgccataaaacctttacttcccataatatcaaatactctcattggaagccctgactcaaaactagatcttattaggtttatatttacttttgaaaatttaaatacaagaggcatttctaagtagtgctctgcatttccaatgtaaactttgttatcatgaaatactcttccccacaatgaatctccataaaccttaaaatcaaatttttcggaaatcacttttgccatgcctattctttgaagttcatcaaattttctagacaatataaagtacatgaatcttctatctgacataagcggcattttttccttactaaaaaattttttcagtttttctactaaatcatcatttaaattttcatctatcttattctgatttaaacattttttctgtaagttaaaaatagcatctatcgtattgagctcttcatctttaagatcatttgctatagaattaaattcatttttcattatggtatttccaacaaaacttgcatcacatgagtattttagaaaagcattatcatctgcctttacattatcaagtctatttgtattggccgcttgaggaagataatacgcattcttcacaccaagattctttatttcagagattattccctcatcaaaatgaaacagataatttacactattaaaaacttcttccttataaaaactataatcaggtatgtctactgtccaggatatatattttacacctatactgctgcaaacatttgacagtgctgatataaaatttatggtaaaaacatagtcaggcagatattctcttatgaagttaaaaatctcctcaactttatattctctaatatttttaagtctgataaccttgtatccaagcttttcaaatgcctccatacaatctctcgctatagtaacatggtcaaaaaccattattttcttactttttatgtctctatttttattctgtataaaattaaacacctcataataaaattccttatacaaatcagttactttatcattataaaaaatacaataattttctattttacaaatatccttatattgttcacctatatacaggtgtacattctctttatctaaaatctgatctgtagctttgtttctcattgtttcttcaacaaaacttttttcacattctataacatatatttcacctgaatatgtatctaaaatttcctttagctcatacccaagacctaatccaaatatgattagactattactattgaaattctttttaatacttactttctcaggagaatattttgaataaagatattttgctttattactttcctcaattttgcaagtagtattgccatttttagccttctcaaaaataatgttcacaaaatcacctctattaaagaagtccacagtttttcaaaagttgtcttacttcatctaatgtaataggttcaatactagaggaattatagcttccaatttctgctttcttatatttactatatttagacttataatctgttatataaaagcttgatggaattacaacgtaagaatgccctaaatcatacgcatttacagattcttctcttgtcataagttcctcgtagcatctttctcctgctctcaagcctatttcttttatttttattctttcaggatttatatccaattttcttgaggtttcttctactacaaccttagccaaatcaataagctttatgacaggcattttaagtatgaaaacctctcctccagttgcctcttttgctgctgtcattataagctttacagcttgacttaatgtcatcataaatctactcatagtaggatctgttactgttataaccgcattctcttcaatttgctttttaaataggggtattactgatcctctcgatcccattacattaccaaatctaactgcaacaaactttgttctgacatttcccttactataattagctgcctgcactaatttttcagctaaaagcttagttgctccataagaattagtaggatttattgctttatctgaacttgtgaaaacaacacactccacattatgatatgttgctgcttttataacattctccatacctgttatattagttcttatagcttcttctggattatactcgcaagctggtacatgtttcatagcagcaaggttaaataccacatcaatgccgttcattgccctctctactctatcataatctctaacatcacctatcaaaaatctaaatttttctgcaatccctctaaattcattctgcattaagaattgtttatactcgtctctgctaaatattcttattacttttggattttctttcaaaagttcattgataagtccatgccctatggttcctgttcctccaactattaatacattttttcctgtaaagtatcccattttcaatacctcctttgtattctataccaatttcagaagttctaccctataaagagcgtctgcagcatattttattctcctaaactccatgcctgatttataggctatatctagtaatgaattttttccatcgctcatatttaatacccaaaacattgcaaattcatcgaaaggatagtcgcttcctcctccaatcattctgtaaatccctctctttccgagctgaggttcacactttggatttagatttaaatatgttctattattttcaattgtatatataacttcaagataagttttataagaatctgccagcccatctttattcatataacaaagattatctgctgatgtatgatatccatcaaagccatagcatgatctcattaaagaccctactggcaaatttattcctggagatgaaaactgcctttcatcacttccccatggaaagaaatctgctacataatactcacttccacaatgcattaaaaccttctctactattttatctatttcagcatcaccaaatttagttcttttataattttttattccagcatcaccaacacaagttgcaaccaaacccatctttatatttttaagcttatcttcatttctgctaagccatgttatagatcctatagtttctggtgcaaacaaaaatctataggaatattttgtcttaagcttgcttaaggcttttgctataaaagtaataagagcaacaccacttaggttatcattgcacatagatggatgacaggtataggttgttaatagtatctcttcttccagttcacctctaatatagtattcaccataggtaagacttccatcttcaagtgacgaatctattaccacctcataatcgtcatcacaaagttcatcaaatttattttgtgtcaacgaaaaaccccaattttctttataataagatgttaaatacggtattctatctttattgcctggaatagtatgaagataaggtttaagttcatcaagtgtcatagttttatgtaccggaacactataactcataacatgaagattattttctttaaagtcaattaccttttcccctttggaatttcttacataagcgtcttttatattccactccttaggtaccgtccaatcaaacacttttgttccagactttacttcatgtatttctaaaggtatatgctttcttataatatccatagtttttctgacaccatttccagttatactcctgcatattggaaaaagttcttctataagattatatatttctcctccagtctcactactgttttgtatatacttatttatttcttccatgttaaaccactcccggtcattttataaattcaatagtatcttctataatttttaaatcttccatcaattcttcagataatttgctatagtcttttttgttttcatctcctatttcacacacataatttaaaaggaaatgcttttcaatataacttctaattttctcatatcctttatcttctttattgatatcttttatgctttcaattattttttcgccttctttaagtgtattctttaactcttttattacaccacttaccttaacattattactttttaaaaatacacttgatatatctttatttaaaattgatttacagtgattatgaagaactttttttaactcccctatttttgttccttctatgtatgccccgccttctgtacaatttatgtattctctatcactataaatttttatcatctcttccatggtctttctatacatatttagaacactatccgttttaaccatttccccaaatacatctttaacatacatttcattctctaactcttcactgctctctatttcactttctaagctagctatacctgcatgagttttatcatttgtatatgcaaaatcctgacctatcattattattggattacaaccaagtttaactgcaaggcctaaacaattatgagcaaccgaacctccatggtcaagtgctccaacatcagttccaagtaacctctttaaattttcatcataagaatttattatcttatttcctttgtgattttctactaccctccaatttgttttttcaaaatatacaagaggaaatctgctgtagtcataatctttaatctgctgataggctatatccgctggatctataatgcatacaaaatctggtgatataccaagttctaataaaggctttaatgttcttcctccagaaattattacgcatttattttggtactctttcaaataagatatatttttctcaagggatggtccagccgatacaattacagcaggaagacctttaaataaattatttaaatagtatactggagtacttttgactatgtatcttaaatttttaacataacattgaaaccacaacttagaaaacttttcattagtgcccttattacttaaagatatgtctatataatgctgaagtatttcggtacaatattttagttcatcaccgtaaattctattgtaatttgggaatacaatataatttatttcactcacttcgttttcctttaatatgctggatagactcacaaaaaattcatccttcaataaaggacataagtaaaatcttttatcgtttactatttcattaaaatattctgtaaatgtaaaagcctttatagtattgaaatctggttcaattactacaatcttctttaatttattattcatatgtaaaatatgttttatgtactctccagaaccaagaccaaaaataactgctatgtctttgtgaccatcttctattttgttaaatatatcttctatgtcacgagaagcattatatttgcttcccatatacatactttttccatccttaattacttttaatacatttttgttgtctttacttttctctataacataatttacttctaaattttctttttttgatttttctatagaattttttgtaatctcattcattgtcctacctcctaaagtcttaggaaaataaatatacacaagctttaaaactatatttccacaggttcccttagtaaataaaatatatccttcttaagcattttaaatacctcatcataaagctttcttgcatcaactgataaaatacttccatcacctactaaagtttcactcataattttttcttctaaaagatgcttctttaacctttcagtttctagcacaacatttttgtctagatacctaacataaaatttacattctgaaagatattcattttccccatcttttatctttcccttaaaaatctttaaatatctatatggaataccaaaactctgctctatataatgaagataggtacaggagtgaaaatctgctcccaagaacaatagtttaccattacttttaaacaatttatcaaaaatggaatcctgtccgaaggaatccagggaaatatttagaaattcattttttctttctccccatacgctgcaagagaaaataggctgaacagttcttactgtatcttcactttttctaaaaaattcatttagtgcgccaactgtacccttagttttcttcacatcaaaaacttcaccattacaaaagctgtaagaaaaagtcggcattataactacacctttttttccaactacatccttaactgaagatagtatatcattaaaaaatttctttctatctgttaatataagctttccaaaaacagttatatcactgtgaagaaatactacatctccctcttttattcctaatttcttaaatgctagtttaaagtcctcgctacttatttttttattgctaaattcataaagaaaattcataatatatcataccttctaacatttcttacttacagtcttttcaagatctttaaaggtcttaatactttcaacttcatccattgtaaattttattttcaatctattttcaagctcatttataagcattaagtgactaaaagaatcccactcatctataacatctctttctgtgctatctttaacatcctcaatatctatatctagcacctctgcaaatattgcttttaacttatccatatatttcatcctttcattaaactatatctataaattcaggtttatcaacttgatttcctgctgtcttttcataaaatttagtaccattttcttcttttatacacttaaaccccatgctttcatacaaatcttttacaggaatattcttttttgtaggaacatagcttgcccttatggtattaatcccttcatttaaagccttactctcaatataattcattatggcatattctatttttctccccattactctacagcttaaaagtagcgtatcaatatcccatatattattttctttctttattatgcctaccccgcaaataccattgtctccaaatttatctttaactgaaatagacaaaactaaacaattttcatccctcataaaattctctatatcattttcaaaataccttttagttgtcaaattaaattggtttgttttttgagttaattgtgctactctagaaatattgaactcatcatctatttttacctctgcacgtatattcaatgcttttaagtattcatctatactattaatctcttcttttaactcttctctttttctgttttgagcatacataaggcccttcttcttatcttcatcggttaagtataaaacgttgaattcatcacttatatccataattgtctttaaatatagcgacgggtccgaaggcatatttacaaccttaacctcacctttgaagctttctctaactatttcacaattaagcttatcatcgtccatgaaaaccatgctatctatacctatgtttagctttttagctattgctctcatatttgatgccttatcctgccagtttatctcgaaatctgcaaaatcctcttctctcagcaccatatatggatgttttcttattacttccatggcatcatcatagttattcttactattaacagccaaaattactccctttttaaaaagtgactttatgtatttttggaattcataaaaaggctttcctgaccccgttggacctagttttatcccttcaatgccatcttcccctacaactccaccccaaagggttccatccaagtctaaaaccaaacatttctttatagatgacataataggttttacataattcatgtattcacgacaaagttctggcacatatttcatatcaagcttcatatctccgagatagtacatcttataatctctttcaatccctttaccaattctgcttaaaaatttatcataatcaaatatatacactctatcaacatttttaaattggtttcttaattccaaattgatagtttcaaccatttctgaaaaaccaaactcctgtttgttttccaaaatccccataggagaataaaacggcacttcaaaattatgtacaataacactgcaatttaaattttttcttatagtatttataagtaatttaaattcttttaaaattttatcctttagttttattctttcctcgcttcccattgtaaaacctttaaagtaatcatcaccaattgcagtttctaaatccactgcaattattactacatccggatttgatttgtacaagtcactactataatctaaaatttgctgactatattgattgtattcactcatatacgtatgagcttttatacccatataagcacacataacccctagagtttcttttacacctctaagggtagaccctggtaaatatgcaatttttatagttttactataactgtcatttttaattttcctatactctttaatatattctgatgtagtcatatcttaacccccattaaaatgtaatttaaaactcttagaatgcatacttcattatttaatagcatctataagcttgcttgctattgttccctttatctctgcaccactactgcaatttataaattcaatatccttagatttcattattttttgttcaatccaactcttaaaatacaaaaaaccctcatttgtttcaaggtattctccatcaacagatcttacttttttaattccgctgctttgtgaacttccataattatcgtgatgagacttcccatttaagtaagctaaatcttgaccaatgaatatgacttttttaggcttcttaagtacagctatacttaaaatagcagtagctacagatttccctgtttccaccacaacatcgttattttcccttgcagcgttaaaatcattaaagaatagaaatttctctccactccactctgaaaccactctactacatgctgaagacaaaaaacaaagaggtatatttttatttagaattgattgaagctgagtatagactatatcttgaggatcaattatacatatcatgtctggaatgatatgattcttaattaaaaattcagcagcactacctgcacaaaatatttttactctatctcttactttctttaaactttctatattataatcaagcgatggccctgaagaaacaagaactatgttttcacagccaaagctataaaagcttaaaaaatcctgcatttttttatgggttttctttaaattcatatcatagttatactcagctaattttccatgtttctcaatctctattttagcaagctcataacccttaagtaaccttgccatatgaccaaactcctctggaagtactttaagagaaggtctatatataataatatttttagctagcgaaagagattttgaaaattccttcaaaaactcatcaccataatcaaaaaaacatttaagcctaggatttttaattagttttttatacaaactttgttttttagcttcctttataacttctaaatccgcatcaaaaacggcaagcatactttcttcgttcatgtgcctaagcacagcctcaatatgatatcccaagccaaaaccataaataacaatgtaccttgaatttttaattaattctatattttttatagcaaaggtttctgcttcccttaaaggatcatatttgctgtgaatgaatacaccgtctacttttatggtataattttcagtcttggtttttacaatttcaagttttctttccatatacattttcctaatttaaaagacttttacttattacattctcatagttttcaattatagggtatacttcatattgaaataaatcacctactaatatatagtcttcattttccatggcttctataacctctgaaaacttttctgtaagttcactttcgtctaattcttcctttagcacatcttttgtaagcgctataagatttattatccactgaaacccatctgacgcttcagttattatttctgcccccttttcatattctccactttcatatgattcgtaaatatcctttattcccttttttaatttaggtatatactctaacgcagttcttaaagcttctattttttcgctcatctttatcctcctaaagttagcattttctatacataatatcgtatttatttaaattttctttaatttaagaaaacatatttatgattctttcaagctttttatacatttttcaatttcagggccagcttccattattgatgttttaataccattatataacaatatgttttttttataaacacgttttatcttttctttttcagtttcattatacttttgcttatattctttattcatactcgattcgtatatattagggagaattaaattcctcataaactccatttctccaatgctactgtttataagcttatcagttttgctaagctttctatttatgttgtctattatagttttattccacctattctctttctctaaaaattcactgcataaatcaattgatgcttctatttctttttttactttattcattatttttttagcatccattaacttacatactacttgttctctactcacatatttccctatattttcacccaaagtataatcttttttcttatttaaacaaaattttttaagaacttccttaagaggaattatttttgtaccttttatattggctcctccctcagttgaatttataaaattattttctttaaatagctgtgtcatttcttcaagtttaattctataaaaattcaaaacagaatctgactttataatatctccgtttatatcctcaacatatactatctttttatctccttctacatttgtatcacctgctgaatcagcatgagctttgtcattagtataggcaagatcctgacctataaaaataattggatcaccaccaatatatactccaagaccggcgcaaacatgagcaacagaaccaccttcgaatatgttatcaacatcatagtttaaaaattccttttgtaacccaagcattcctatatcattaaaaaatattttttctcccttatagtctctaagtatttcataataagtatactcgcaaaacaaaagaggtgctgtacaatcaaaggttcccctcataacatcataggctggtacatctggatctacaacacatacataatcaggttttatatctaaatctaaaagagtttttaaagttcttcctcctgttataattatacatttatcctgacaatcttttaaaaaacgaatatttttttcaagagatggtcctgcggaaactaccaccacaggcatatctttattgtagttactttttagcttatttacagcaacactgtctaatatatattttaaatttcccataaatgatttataaaaatgttgtgaatgaaccataagcgtatttacttcaatcaatgcatttctcaaaaaagttgtataaacttttaaggtctcaagagcttcattttcatagactcttttgtaatttgcataaaaagcaaaattagtattattaacttcctctttcggaataagtaattgaaataaagcttttatatcgtttgcactaaaattacttaaaatgactctatcactttgaagtacttctaaatttactttatttttaacaagagtatttataactttattatcctgttcaattacaactataatattgttttctgttattttaagaagttcctttatatgttctcctgctccaagtccaaagcatacaaaaatgctttccttattatagtctcccatttcatttaaaaacttatctatatctttttttacattgtacttacttcctaaatatatattttttttatttttttcaacctttataatatttttattatccgtacttttttctatacagtactgctcttctttattatctaaactatttaaagtaatttgtgttatattattcattttccactcaccttatatattttttatattagtattagtatatttatcgaaaaggccctaaatttctttaaaaaaataaaaggatgcattatgcatccttttattaaatagactatcttaataactgaagaacgttgtttggtgtttggtttgcttgtgaaagcattgcttgtgcagcctgaactaacacgttgctcttagtgtagttcatcatttcactagccatatcaacgtctctgattcttgattcagctgattgtaagttttctgaatctgtgtttaagttattgattgtgtgctcaagtctgttctgaacagaacctaatttagctctttcacttgaaactgtatctattgctttttgaactgaagtaatagcagcttgtgctcctgtttgtgttgatattgaagcagatgttgtattaactcctaatgaagttgcgctcatgttgtttattgaaagagatatagtctgtccactattagctcctatctggaatgtcatttgtgcagttccagtaagacttccatctaataatttcttagtgttgaactctgattgaacagctattcttgtaacttcactttgaagttgtttgaactctaattcaaggttagctctatcagtacttgtgttagtaccagttgctgattgaactgcaagctctctcattctctgaagtatagcttggctttcatttaagtttccttcagcagtttgaactaaagatataccgtcttgagcatttcttgtagattggttaagaccatttatctgagctctcatcttttctgatattgcaagtcctgctgcgtcatcaccagctttgtttattctgtaacctgatgataatttctcgatagagtttgctgcctcaccattgttgatgttcatttgtcttaatgcattcattgcatttaaattgtgattgataaccataataaaattcctccctgatttttaattaggcatccttgcctttatttttttattaaagtttaattaacttacaagaaatatatcggagcatttctttatcactttatatatttctttatttttttttatatttttttacttacataaaatggtcctacgctgaatttctttccataagtacttcttgcgcttttgcctccacgtaattccactattgatttctcgacttcagtcttttttaaacttatagcgtgttctaactttttttcctcatcagatagttttaagctctcaaaagtatttctaatctcttttgaatcataattctcttttttaatctcttctattatatttcctcttctgttaaaaaaatcactgatatcttcatcatactcttctttgtatattttatcagataattttatagttaaatccctgtactccattaaaagttcagttaaacttttcataatttcactacctctaatatattatttttaaaaaataaccaattagcttaaattatatactacagttttgataattgagattgaagagattgctgctgactttgtgcttgtgctaaataactttcaagctttgaatactgcagataaaactgttcttgtttatctgataatgtagaatcataatcatttatagcttgaagcttatcttttatttgcttagttaaagtacttgtagtatctgtacttgtagatgatcctgcaagctgaactaaagttcctggcggaaaagtatttactctagtatagtcctgcataatatcgtttattctctgaaaaattccttcttgagaatatcttgtttgtcttctagccatagtttttgctatatcagcagagctttgattaatatcattatttttgatatataaagactcatctttagattgctttgcaaatatattatatatactgctcccatacttctttatagcagtttttaacgtagccggatcatatttcatttgtccagccttgtttacagcatctccaacaccactataagaacttattcctaaatcagttaaggtaaaacctgccccatcaacaccagtataaaaagcctttctaaactctgtaaccatgctctgcaaatatgaatcatttgcaagtataccttgtttagcctgtgtctcccatttagtcacctcatcatcggtcattgcttttttctgagcatctgtaagcggcttatagctgtacgttttagtttcatttattttatcattgatctgctgtacataagcattatacttgtcaataaagcccgttattttattgtatatcttgtccacattaagagtcatttgtatattagctttgtgcggtgtatatacagaacctgactcagctaaatttattttacttatatcatactcaacaccatctactgaaaaatcattattcattgattctacagtaccctttgatccattaggctctgttatagtaacattagcattaacaccatctatcatattaatacctgttacattacttaatgttttagttttactattcccatctatagctgtaacactagctgctgtactagtatttgttccacttaatccaaatatatttttaaaaaaattatttccactagcattataatctactgcaccaagagcaccttttcctccgcttatacctcctacaccaacaacagtatctgctggagcgctactatctacagtagctcctgatgttacctttcctgttgtacctgattgaaagatatttccaccaatactgctatttgcacttatatgatattgaccgtcaagcgtactgctagttacagtaagattaaaataacttgctacacttttaagcgtatcatctactgacatatttcccaatttaaaatcttgagttttaccattaaaaacaacagttaatgtatcatttcctccattagcagcaaccgcggaacctgaatcactaagagtataagtttttccacctgcgtcagttacagtttgtcctgtaagcgtattagcatttctagcagtagtgccaactctatttaccgtaactgaataatttccttcagcagttccttcatgtccttttgcaattactccagtatccttgcttgcatcacttgttgtatttgtattgtcatcacttattcctgtataatcagcataagcattgggtgttaacatatagttgtcttgatttaactgatcaaagtatgtgcttgagagtgtagcagaacttgttgtaactgctctatacgcatctcttttccactctagataagtttcatcctgcttcatggtgtctctcttcatctcataaggctgcataagcttacttactatactgtcaacatccaatcctgatgccaatccagtcattctcattggtgaattataagcggatgtactgcctgtaccacttgtactactcataatattcctccctacaaactaccttttagataacttatatgcctcataccacatgtccctaacttctataataagtggcatagtttcatctaaaatattaatatccttttttaaatttgctttaacaagctgagaacttataaaactatatagtttaaataaatcctcaccccaatctcctgcttttgacaagtctaaacatgccattaattctgtaaagatatcttccactcttataagatactcatgagtttttttaatatctttagcttccattgaatttcttgctattttagcgaattttacagcgccatctacaagcattaacaatagctgctctttagaagcataagttacactgttatttttatatgtcttatatgcattgctaccatacataatagaaccccctattctttcacatctagaaattttccaagtgtttgtgtttcatcatctcttacagcttctacttctatttttttttctttcacagcttttaccaaaatctttttatcattcttagaaaacttataattgcctttttccttattcttttgattttcgggattaactttaaactcctgcttcgttttatcgtgtaccttaccttctttggttatttcgtttaccctttttcgaacttctggttctattttatttaaacgaaactccatttttttacctccttaaactttcttatctaacaaaacaccatctgcttgacaaagttttgctaccatatcaagaattttttcaggaggtatttcttccactacctttttagtatcattatcaacaatttttattattaaatcaccaaagactttgtgtaccgaatactccacatgagtattatccttcttaaggagcttatcaatgtctttccctgtattcttagtttctttttcattcttaatttcaatattctctacattttttactgcatctatttctattttttgagtcttaatatttttactatccacaggtgtattttctagcgactgtcctccttgacatactaaattaatatccatattattttacacctcgttttatacttatttctttagagttaattcctttaaaacttcactactcttaataacggcttctttattctcttctttaatcttattgtataattcttttctgagaatagttacttctctaggtgcattaatagctattttaacagaattttcatctaaactcacaatagttatttctatatcatcacctattaaaatagattcgcctttttttcttcccataactaacatttaagtcactcctttatatacctagtatacaaaaattttagctatgtatcataggatattttatcattttttcatcatcgcttataattatttgtttccctaaatgtttatttatatttataattataggagcacctaaattagtcgtcattttctttatatctttagaaagatttactgtatttataataagaacatccttctcactatctatcttaagttccttaacaagttcttcgcttagattaacttcatagtctgccttaacataaaaaggtgacgatactataaaagcagtttccttgtcttccatagaatgaaacaaactgaatacctcgttattctcaatcccaactaatataaatttttttaaattttcaaatccagacattccctttacaagatttattatattgttttcgttatattctataattccatggtattgagtctcaagtttcatatgttaacctccgaatttatgacatgtaatccataagtgttggttgaattatttttgcacttgtctgaagtgatgcaagataaactgtttgaagtgctgcatagttcattgtagattcagtaatatctgtatcctcagtattggataatattaatgtcatgttatagttattttcttgattatttttttgtgcactatccattctgttttggctagcaccaactgtagaacgtatagcaagtatattttcaagcagtgcatctactgcctcagcatcctttgtatttaaatttgatactcccgaattactgcttaaatctgttactatatctgaaaatacctgccttaaatcatagcttttttcaataccactagctgatactcccttataattcattatttcggtagcatttacactgtactgtgttaaaacaccttgtgatatctcaacagaaagatctttacttatctgattgattttatctactcctatatattgatttttaaagctacttaatgctgtaatatttgttccacttgttatggttatatctttgtcactaagtgctgttacccttatataggtttgatttcctttaacataagatattgctgaaatctttccttttaaacttgaactagaagcaattttagaatttattccatcaagtatattttgtattgaatctccgttatttatttgaagctgaactgtggatccacttccaagcctaatgtctaaatctccacagccacttgctaaagatgctacattacttgctccagatgctactggcaaatcaatactttggttactgtacatcaaatacttatttcctgatgcactatttataatatcgagaggtttttcatttcctctagttcctccaaataaatattgcccactaaagctagaatttattacatttgaaaattcggaaattctttgattaagttctgcttttatagaatccctctgatcttgagtgtatcctccatttccagcagaaattaaaagttctttaatcctttgaactatattacccgcttgattcaaagctgtatctgtttgatttagccagtatatagtattgttaatattggtattatattgactatttatacttatatccgtattaagctgcatagattttgtagctacatatggattatctgatggctttctgatcttttttcctgatgtaagctgactttgaatatctctcatattttgaagattagtattcatatcagtcaaaaaagtatctgtaagcattctatttgttattctcatttatataccaccctttacctcttaagattatttacaacaacatctaaaagctggtcaactgttgaaattatcttagcacttgcttgatacccatgggaatactgtattaagtttgtcatttcttcatccagtgaaacaccagatgtagcttctcttgtttgttttatttgacttaatacattattagaacctttaacaccttcgcttgcactctgattatctattccaagagtatttacaaagctttttaagtaatcgtcaactgtaacaccatctgggtcacttttaattgtattaaccccagtatctgtatccttaacaagagtctttgcgaaatcacttctagtatagttatcaggatttacatcttgaattttaaaagcaaccttttgaagctttgcaagtgcaatggctctatcctgatccgtgctaccatttactgcattttcacttggaagtccatattgatcatcatttgctcttaccttcaatgaaggattagttcctaaaagatcaggatttatagatatatttcccgccgttatataatcctcccagttcttacctgaatttgttgtatcattgaaatacttacttggtttaaaagtagtatttgaagcatctttagtaaagtctgagttcacaaatataggcagctcatctaaacttggagttgaatgtaccccatctgaagctagttgagattgagtaggattaaccataccactacttacagtatttatggcaagtgcaattgttttagcaactctattcatttgatctatatatccatttatcttgtcctgaactgtttgttcaccatttatatctccaccaacaggcttaaataaacttaagtcactaaaattatatgaagaagcagtaccatccaattttgtcttaccatctgcacttgatagggcaattccattcttatcagtcataagtactctagcttgttcaatctctttagcttgagattctgtcatattaatattcagcttaattctattatcgctggaagccttattgccaagtttataataatctacttcataactgtatatttcttctcctgctccgtttttacttcctgtatctgttccctttaccacagcatctatataagaaaatctattaacattgtcatttccaacagatttaacaagtgtaggatttacatttcccaccttatcaagaacagaaacatcctctccatcaaaatccggactgctgtctacatttatgccaaacttctcactaagttgatctaataataagtctctgctatcttctaaatcatttggttctttaccagcttgttttactgttattatttgctgatttaaggaatctattttatctagcatactatttacggagatgatatcatcatttatacctagttgaacatctccctttaacttagtaagttgagtatatatgttatttaactggttagtcatagtctgtgcattacttataatactctttatactagttggagtagccgaactagcattggtatagttttgaattgctgaaaagaaagttgttatagatgcagaaatccccgcacttgaggattcatcaaacatactttctacctcactcaaataattatttgtagtcttaaatgttccatttctagttgtcaaatctcttatttgataatctaaaaaactatcccttactctttgaactgaatacacttctgctccagtaccaaatagccctggtcctgccgcactgttaaggcttggcatcccatatggtgatcttgtttgtatgtcaaccctctgtcttgagtatccatctgttgatgcattagaaatattatgtcctgtaacatctatcgcttgttgatttactgtaagtccactaacgcctatattcaaagttccgaataatcctggcataattccacctcattttacttagttttaccataacaattatatgttttggctgcgccattaggattaatggcatttaatacttttgttgtaaaaataagtccctgcttaattaatagctcattagaatccttttgaaactttattctctcaagtaaacctctcatatctaaatataacttatttaaggattgatcattttgttccttaagcagttctttcattgtcttattttctaccaattttagtctgctcatttcacttgtagctacttctttatttatcttttctatttccgtaaccattttgtcaagtccaaaaacatcctttttaatgagaagctgctgttgaatcaaaagtgaatcaagtaatttttcaagagaatgaaactcatcactcataactttctttaattcttctttcataactaaacttctctccctttaatataatctaatattttttttgcaagtgaattggcatctaccttatagtttccttctgtaatttctttttttatctcttctaccctttttgtaccagctttttttatagattcattttcggaaaaagtactgaggtatctgcctgtatcagatatttcaataacgtctttatctttaggagcactattttttctgtcattgacgctgctattgaatttatatagctcaatcttgtttcctgcacctatattatttattttcataattttacactccttaaaagctagtaacttaatttaaagttttaaagctatgttattatctatagtttattatcgtaattaccattttaaagtttatattgatgattgtaaaatttcttacaagcgcacatataaaaataaccgggtacgataaaccggttatttaaaatagtctatttttttaagctctttattctttcttcactattaacaatacttgtaattctaacaccaaaattctcatcaacaactacaacttctccataagcaacctttttgccatttacaagtatttcaactggctcttctgcaagtttatcaagctctataagagaccctgtaccaagattaagtatatctttaatgtttttcttggctctacctagtacaactgaaatctcaagaggaacatccaaaataagatctatatttttaggtgctccatatacatccgaagcttcaagtggttgaaaagaagctctattaacttcaacctgaggctgaccatacacatgtccttgaggcatcatttgttgctgaggtgcctgatatgctgcttgaggctgcccccccattggctgcattgtttgctgttgtgactgctgcataggtctctcaatagctggctcattaaccgaaggtgtttgattcaccggtgcagcacttacagttggctcaggtgaaggtgctgcactttgttgaacctctggttcttccttattactgcttcctcccatcattatatctatcatttttcttgatgtatctataggaagtatctgcattatttgactatcaactaaatcaccaatcgttagtttaaatgcaacttgaacaatattctcatcttccttaatattatctgttaatacatcagttttagaatcccaaattttagatactggtggtgatatattcacctcacgcagtaacatagtagccattgaagtagccgcagacccaatcatttggttcatagcttctgaaactgcacttagttcaatttctgacaaggttttactttcaaccttaccatctccacccatcattaaattggcaataacagcagcatctgtaaccttcattacaagtaaattctctcctgatattccgcttacatactttacatctaatgcaacatttggaacttcaaaatttttctttaaagtttcaagtgttgtaacactcacaataggagtagttatatttactttttgcccaattatggttgaaagtgctgtagatgctgagcccatagaaatatttcctatctcacctaacaaatctttctctatatcatttaaatcattatcactggctgtattttctttttgttcttcaggtgaatcagaactactgtctcctccatttaaaagagaatctatctcctcctgtgaaagaaatccatcactcatattttcccacatccttatcaattttatctaatatcttgattcccatattcttgcccaagattccaggcgcagccaaataatgtaaattgtcatatatatatacgggaaccggatcgctgcacttactatttaaagttattacatctccaatagataatcttaaaaaatcttccacagttatttcagtttgccctaacttagctattacaggaacttctactacgtctaacctctttctaagttctactcttgattctttaactatttcttcatcattttcctgataccaatattgtacaacgagtttatcaagtatcttttctatacttagataaggtatacaaatatttatataagtgtgactatttccaacatctacggaaaaagttataagtgcaactggctcatgaggagctaaagtttgattaagcgctggatttgtttcaagagattctatctctggctcaacattaattacttccccccatgctaattttagattatcaattaaaccttgatttatcttcataataatattcttatctatatcagttatctctcttggcttatattttcctgcaccattaccaccaagaagaatgtctatagcctgatatataaactgaggatttgtttcatacaaaatagatcctttaagaggcggcattctaaatattgttaaaattgttggatttggaactgaatgaataaactcctcataggttatctgttcaactgtttctatttttacctttacattatccctaagttgtgctgttaaataattggacattattcttgaataattatcatgaataagctcaagggttcttatatgctccttagcaaacttctgcggactcgtaaaatcatatacttttactttttgcttttcctcttcttttggaagttcatcaggctgaagttcaccggaggataaggcagataatagggcatctatttcactttgtgataaaacgtctgccataattttccctcatttcttttcatttcttcattatcaattcattatcaattctttattaacttatcaatgtcaataagagtgactattctatccttaaaattaataacgccttttacataatccttcttgtcgtcatctactttttctatcaaattttcatctatatctaatacttcatctacttgattaacggatattccaactggttcctcttctaatcttagtattattatactctcatcttcacattcagattcgtctatatcaagaagaagatttatatctaacaatgattgtacgttacctcttatatttatgaggcccttaacataatcaggtgccttgggtacttttgttacagtcatgctctcaacaatagtctgaacccttgatgtttcaactgcaaactgctcatcatttaacttaaaaacaacaacctgcattatctcacccctatttactcttataatagcttcaagtgaaccctatgaagcgttaaataaatactctatttatcctaaagcctttttaatagcctcaagaactctatcctgttggaaaggctttactataaagtctcttgcacctgctcttatggcatccataaccattgtttgttgtcccattgcagaacacattataactcttgctgctggatcaaaagcttttatagctttgacagcttctataccatccatatctggcatagttatatccattgtaactacatctggtttttcctttttataaatttcaacagcctttagaccgttacttgcttcacccactatttcaaaaccattcttctccaatatatccttaatcatcattctcataaaagcagcatcgtcaacaattaaaactttagccatttttttcaacctccatattaatttactcctaaaatatttagtatcttttctagtgaaccaggcattggtatgtaataaaaatgcccgcttatatttttagttttgtcttgaagaaaaactgtttccaaatcaagaacattatcatcacattgaccagcttctataaaactagttgtaagaattgcacctaacatatcataactaaaagctggaactgatggtgttataaccaaatttgtaaacttagatatagcattcatatatgaactagatattatatttcctatttcacatagcactgaagagctcaaatctgttaaatcatcatccttaatacctgttaatgtttcgactatttcaacagccgtttccttttcaaatacgaacaaaatatttccaggagtatctccaagtaccctaaccacaactccaactgctactttttcttcaccaatttctgaaaaaagagtatcaaatggaactatattaatatctggtactgtcatatctatttttttatttaatagttgtgacaaagctgttgcagcattgccagaaccaatgtttacaacctcttttattgcatctagttgcataggcgttaattgtgaatagttcataattgtcctcctttaaactagagacgcaacatcgagtatcaaagttacgagaccatctcccaatatggttgcaccaatgtattcttttaaacctttcaaggtctttccaagtggttttattacaatatcctgctgtccaataagtgaatctactagtaatcctgccatcttatctcctacttttactattactatatataccttatcactatttgccttttcaagccctaacttttcattaattctaactattgggagaaccttacctctgtatattataacctctttattattagttttctttatttctgcctccttataatcaattacactgtcaatagcatttaaagaaatagcaagattttcttctcctacttttactaataatgcagtgataatttgaagagttaatggtaattttatagtaaatgtactacctttacctttctccgtagtcatatcaactgttccgccaagagactgtatttttgtttttacaacatccataccaacccctcttccggatatatctgttactttatcatttgtactaaatccttgatcgaatatcaaatttgttatttgttcttctgtcagattttctgtactaattcctctttcttcagccttttctcttactttttctacatcaattccataaccatcatcttgaacttttattactgccttagttccttcttgatatgctataagccttacttttcctacgggatccttaccagctttaagtctatcctcttttgattctataccgtggtcagctgcatttctaataagatgtattagtggttctcctatttcatctataaccgttctatcaagttcggtatcctgaccttctataataagttccatttctttgtcaagttctactgataaatctcttatcattcttgggaacctattaaatacagtatctaatggaagcattcttattttcatgaccaaatcttgaaggtcatttgtagtcctagcaacctgctctaaagtttcattaagttcaacaagcttatagctttgacttatttgttcaagccttgttctatttataaccaactctgataccatatttaaaaatctatcaagtttttctaaatcaactctaacagattgatgaacttttttatgtgattgagtctgactattctttttggctgctggcttagcactaggctttgcttttgaaacaggttcaggtttgcttttattagattcctcaaccttatccttcttatcatcagatgctttttcttcaccaactttatatctagctttaagcttatctaatgttaattgctctacatttatgctttccacctctgaaatttcctttaatatctcagttacgtctttctcatccttgctagttagatatacaagttgtatttcaaattcaaaattttctgcttccaaatcttcagttccaggaacagactttgttatttcgccccattcctcaagactcttaaatattaaaaaggctctagctgatttaagtaaagttgctttacttaaattaatatctatataaaaggcattatatcctttttcaatagcttgcttcataacatttaaatcatactcattaagagctattttagcatcactactaccatcattatcattttcttcactatttttatcgttactatcttctaaattttgagccttttcttcatttttattagaattaaccataccagctatagattcaagttttgttattatatcatctacgggtatctcttcctcttctccattttgaatgttatcaaccatctgctcaagtgtatctaaacatttgaacaaaatagttacaacctcttgagtaactttaagctcaccatctctaaactcagaaagaacatcctccatcttatgagtcaatgctgccatcgtattgtagcccatagtagccgccataccttttatagtatgcgcaactctaaatatttcatttagtttatctacattctctggctcctgctctaattgaaggagtgcttcatttaaagtttgtaaattatccatagattcttctaaaaatatcgacaaatattgagatgtatccataaattcccctccttacagcttcctataaataaaggtcgaagctttttcaaaaccatattctttatagttatatatgctttcagtagctcccacaaaaagcaatccacctttttttaatgattgactgaatttcttgtatattttttccttgacatcttgattgaaatatataacaacattcctacatattacaaggtcaaaattgttatcataagaatctaatatcaaatcatgcttcttaaatgttatcattttttttattttatcaactataatatatttatcgcctacaattctaaaatatttatctaaatcttgtttttctacattttttatttcattttctgtatactctccaagtttcgctttatttaatatagtagaatcaatgtctgttgctattatattattttttcttagagaatccaatttatctagtataatggctattgaatacggctcagctcctattgagcatgcagcactccatattttaagcggttctttactagagtataacatattttttatctctttttctgcttccctaaatatttcaggatttctaaaaaattcagtgacatttatagttataaaatctaaaaatctttgcctctgctctggatccttttttaacatagaaacatattcatctatagaagaagcacctactcttgatattaagctaagtattctcctatggagctgattttccttataagcaaataaatctaaaccaaaatcctttagtacccaattcttaaattcccctatatccatagtctacctcctaagacctcttactatttttattatctcatcagctacattatctattggaacaacaagatccacctttccagtttcaaatgctgctttaggcattccatatataacacatgttgtttcagattctgaaatagttacaccaccgttatctttaataattcctgttccattagatccatccttacccattcccgttaacacagcactaactatatgggatttaaaaattttagaagcagaaataaatagtttatccactgccggtcttactccccatataggcggttctttggtaagctttattcttgaatttgaatctacttccatatgatatcctccaggagctacataaacaactccctttctataagtctctccatctgttgcctcttttacttctattgcactattatcattaagtctatctgcaaaagctttcgtaaaaccaacaggcatatgttgaacaacaaatactggaacattcatatctttaggaaactttgtaataactttatacaatgctttaggtccacctgtagatgctcctataactactgcttctatgctatcactacttatacgatttgtttccctccttataacaggattaattggtgcaggattcttatttgtattttggctatatgctacccttattctttttatgagatcatccttcatcttagaaagttcaaatggcttttcaggctttggaataaaatcaaaggcccctaaataaagacattccatagtgtacttcatccctttttgagaaatactactaaacactattatcggtatgtcaatttttaatgatttaacagctttaagagtttcaataccattcataaccggcatttctatatctaaagttataacatctggtttcataacctttaacttatttaacaaatcctgtccatttattgcagtaccaataacttcaatattatcattactttctaacatgtcacatattaatcttctcataagcactgaatcatctaccacaataacttttattttttccaatgttatcactccatctaaatttttctaatacccataccaactgttctaatatcgacacttccatcaagagtattaaaaatcattgttctgcctttatttcctccaatatcttgacttaacaatggtacatttaattctttaagtactttcttaactgatataccatttctattgcctatatccatgttcatatttttatccgaaaaattaaacattgatgctccacctgctattttagctttcatatttctaatattagcacccattccctccattttctttataagtataggaattgctaaatcagcaaacttataaggatttgttaccttactaaattgtgtgctatcaggaagcattatatgcgaaagtcctcctaatttatttttactatcataaatagctatgccaatacatgaacctaacccaacagttattatcctattcggagaaaatgcagtattaagatctgctattcctacccttatctcttttatgttctctctttcttccataacaatacccgaactacctacagcagttccttttcctcatctgttaatattttggatatatcaagaaaaataactattttgttatctatttttatgagacctttgatataacgttttgacatacctgatataacatttggcggctgctcaatatcttcaggacctatatctctaacttctgatactaaatcaacaattattccaattttaccattatgaatcttagacactataacctttgtttcatcagttatgtcactttctggaagattaaatctttttgatagtgaaattaccggaagtatcttaccttcatagtttattacaccatcaacaaaactaggaacatccggtaattttgttgacatttcatgacctaaaattctttcaacttgaataatatctgctgcgtagtattctttatcgacaacaaatataagcacctttacactgtccatcatatgctacctcctataataataatttatcaacaataagttcatcatccttatttacatatacatggatacctttgcaagggttttccactacatattctttattgccaatagcaaatatggtattttgataggcgatttctgcatatatgttgccatgtttttcaacttgtacttttgtggatactccacctatgcttccaactacaccacatttaacttcattacctgcctttataactccacctcttgctatagaattatcattagtaaagataacattatttttagcagtcaaatcagaaatatattctcctttaccagttataaatatattacctgagctttctatttttgaattttggcaatacccaacacttacatctacaggtacagaaagcatggatttcaaattagaaaccctatcttcgcaaagcgatgttacctgtgtaagctcgtccaaactttctatgctaagaggccccataccaattagtctagctttaaatagacttataatatcagaattttcctctctatcacatatatctataaacttctcacataatctgggtactaatctaaatttcccttctaacaaaacctttaaaatctgtccatctgtagatgcttttccatgcatattataatgttttacttgctctactgcctctaagagattctttatgtttacatctattgtattaagaaattccagctgctttagtacaaatacatcttctcctccaccatatacgttagagaaaatagcattcttttctataaagatatttccactagctgacactattgcattttgaacgttttgatctatttttacattgtgttcggattcaaccttcatactctcgcttacacttccatgaataaaaacatctccaacaaattttatgtttcctgttttcaagtcaacatctgaattcacttcatgtattgctataactgatattttattcccagagtatataggttcgccctttcgtgttgagacaactgtgttttcatctttaaattcacagccttcacctatattaatctttatttctttaccatttttcttttttatttcatttccaaatatatccttaccattatgtccttcttttccaatatgcctaatagcgagcacagacccctcatctacagcatttacaaaacctatacttttaaaatctattttaccattttcattttcttgaaacttattatttcctctgacatcaaatttaaactcaacttcatcatcttcatcgttttcaaccttcattccctgtgcaataagcatatctactatttctttatcagagttacactttgataaattttcttccaatattccataagttacaccacttgcctttaatgcatctaatatttcagcttgtgtatatacagggggtttttctactcttaaaacttcactttctaaaactactttatttgaagactctgcatcctttagtttgtacacttttttgttaatgtagcttatgcttatgtaagcattcattttatctggtgaagtgcttatatttattcttctttccggtttttctatttcctgaaaaaccacctctatattactagaactacatacctcactagaatctttaacatctttatcattaaccttgacgcctatattcttaggcactacgatagtcgcactttttcctccctctacaggatctttaacaactatcttaccatctaaaatctgaatggtaccatctttcttattctctgattctttgttttcacttttatccacaatctcaactgctatcgacgctttcttcttaaatattccgtttttcacttctataacttcatacttaatatcttctttcaatacgttgtatttattacaagccttctcgatgcattcatcaattgtggagccattaaatacttctctctccatataaataatctccccatacaaaataattattttattaagtaaaagtataataccaagctcatcatattttttacttaatttatcgtaagctttcatcaaacctttataattataagtctttaattaattttattaattactttaatccagtatcatttatactaacattgtatatcatttttttaacttctactatcaaaattttttatataattacttatataatcgtcataagctttccttatattccttatcatctcagttccctgagagttaaactttatatcatcaacttgacatataggtaatactttaggtgatgtacccgaaataaacaatccttcaaactgatctatttttttataatttattttttcatccacaactgtatagccacattgtttacaaatttcaactataatctctcttgttattccaggaagtacatcctccacaggtgctgtatacactgtattgcttttaaccatgaatatattcgatttactaccttctgttatattaccatttctatctacaagtatagcctcaaatacccccttttcttttatttttttgtcaacatttttcctgaaattcaagtttataacttttgcatttggattacttctttctccgtgatacaaaatagttttaactccatttatataatcatattcatctggatatttatgttgcacaaaatatccataaaaatcacatttattttcaaaataattaaaaaccagttttacatttccaacttcacacttattagcctcaataagcttgaatatattttgtttaatattatctaatgaaactggaaaacttagcttttcgatcttaaatgaattttcaagtctcttaatgtgattacctagaaaaagaggaattccgtcaataatccttataacttcatataatgattttccattttctacgaaattcccatcaaaagtttttttatcttttatttcttcatttaaaacaaagtaattttcaacacacttttccatacaatacacttctttccaatgcaatttaaattataaggcatgcatataatttacataaatactagcaaagtactagcgtaaaaaacatcatgccatatgcactatctattctatttccactttagaacttcaatattattatctcttttctttggatttacaagataaggatgtcctaccagcttaaaaagcggcatatcagatagggaatcagaaaacatatacgattccttaaaatccacttctatcttttcttcctctaatacctcctttaacctttttactttttcttctcccttgcaattttctccaattatttttcttctaaatataccgttttcatttgtgaatcttgttccaataaccctatcaacttcctttatgttataaagttcatttaaatagaactccgcagaagcagaaattaaaaatatatcatatccttcactcttaagctttttcatagtattaattgcgtcaacatataatatcttacttagcttcagatcatagaattctttgacatactccttcatatcctcctcttttattccatcgataaaggaaataaacatttcttttgcttttccagcatcaagtatttttgcaaaaaataaaataccagcaaccaatattttaggcagctttgctatgattttaggatttttgcttatcataaacttataaaattcaaataaagtttcttttttagttaaagtatagtcaacatcaaatatagctaatttcttcattaattttgctccttctattacaaatacctgttttccatattgaaaaggtctatgcaaaatgcatagacctttttttaacatatagagaaaaatctatcacatttcacataatgtcaattttttataacataattattataaaactttcagctaactatgtagttacataattaaaggctaaaaattaaaacattaagatttataattaagtcattacataaataagtcacattttcaaataccgaaattctatgttaacgacaaaaatcctatatagacttctattccttatatatttaattttatataaatgaaaccaaagaggacaaactccttctttagtatacatttatgtctaaactaattactattacttagctattttgattcatagcattttcatagtattttgtagcagcttcaaattcttcatcatcaggtattactaattctccattttctccttctccgataactttaaagagatatacagaatcattttcaggattttgaactaaagcatattcattatcattgaaagcaaaaccatctactacttggcatgatactacattaccattttcatcttccaaatcaactaccatagcttcttctgaaccacagctatcgcaaccgcaatcacaactatgatcatgatcatgattatgtccttcatcaccgcatccgcagttaccttcacaagaattctttatttcatcttctttcattaaaacttcactcctttttttacatcatgttatcattctacccttaattgagtaattttaaaagacttttttacaaatttataaaaaaatattcttcagttaagtatattatatggatttactgatacaaaactcattttatgtaaaaagctttcatacaaaaataaaggaccataaggtccttcatttttattgattagctaatcttttataagattcaagtctttccattgcatctttttgagttttagcatataattcttcagctttatctgggaatactttctttaatgaagcatatctaacttcaccaagtaagaattctttgaaatcacctgttggctcttttgaatccaatacaaatgggttctttccttcttctttaagaagtggattgaatctgtaaagtgcccaatatccgcaatcaacagctttcttctgctctaattggctacatcccataccagcttttaatccatggtttatacatggtgagtaagctatgataagtgatggaccatgatagttttcagcctcttttatagcttttaatgtctgattcttatcagcacccatagctatttgagcaacatatacataaccataactcattgccatcattccaagatctttcttcttagttgtcttacctgaagctgcaaattgagctatagctgaagctggagttgattttgatgattgtccacctgtatttgagtaaacttctgtatcaaatacaaatacgtttatatcttctccacttgcaagtacgtggtctacaccgccgtatccgatatcgtaagcccatccatctccaccgaatatccactgagatctcttagctaagtaatctttattagtgtacatttcagcaacaactggatttgcatttctttctttctcaagtaatggtaataacttgtctacagctgctcttgaagtttcaccattatctacattatcaagccaattttgaagtgctgctttaagaccttcacttacttcagtattaattgcctctttagcaaggtcagttaatctttctcttaactgtgaagttccaagaagcatacccattccatattcagcattatcttcgaataatgagttagcccatgcaggaccttgtcctttttcgttagttgtatatggcattgaaggagcactacatccccaaattgatgtacaaccagttgcgttagaaaccatcattctatctccaaataattgagttataagcttagcgtatgaagcttctccgcaacctgcgcaagcaccattgaactcaagaagtggtttagagaactgacttccttttactgtatacttgttagcaacttcttttctttctggaagagtcattgcataatcaaagtattttccagcatcatattggctttcagctggtttcataaccaaagctttctccttagctggacaaacctcagcacagtttccacagcctgtacaatcaagaggacttataactattgagaagtttaattcttcatcagatttaactcccatagccttcttgtattgcattccttctggagcatttttagcttcttctgcagtcattaaagctggtcttattactgcatgaggacaaacaaatgaacattgattacattgaatacatttgtctacattccattcaggaacatttattgcaattcctctcttttcataagcagctgttccaagaggatatgttccatcttctttgccttcaaaagcacttacaggaagtttatctccctcttgtctgtttattggctcaagaagatcagttatgaatttaggttttgctttttcttctttaacttcatcttttgcatcagcccatgctgctggaacatctattttaacaatagctccaacaccttgatctattgcagcgttgttcatatcaacaactttttgtccttttttaccataatttgttacaactgcatcttttaagtatttaacagcatcctctactgggataatgtttgctattttaaagaaagcagcctgacaaatcatgtttactcttccgccaagtcctattccttgagctattttaacagcgtttaatgtatagaagtttatatcatttttagctatatatctcttcatagcagcaggaagcttttcttctatttcttctggactccagattgtgttaagtaagaagtttccaccttttttaagtcctgcaagaacatcatatttgtaaacataactttggttatgacaagctatgaaatctgctttatctattaagtatggtgatttaatttctttcttaccaaatcttaaatgtgatacagttataccacctgatttttttgaatcatatgcaaaatatccttgagcatacattgaagtatgatctccgataatttttatagcactcttgtttgctccaacagtaccatctgatccaagaccccagaacttacatgttttagttccttctggtgttgtatctatttctatttctggaactggaagtgatgtatgagtaacatcatcatttattcctatagtaaatccatcttttggtgcatctaattttaagttttcatatactgaatagatatgaactggtaatgtatcttttaatccaagaccgaatcttccaccaactataactggtcttacatctgagttgtagaatgctttaacaacatcaagatataatggttcagcttgagaaccagcttcttttgttctatcaaggacagctattttcttagcagtctttggtatatatttcaagaagtgctcaactgagaaaggtctataaagatgtacttttaatactccgactttttctcctttagctcttaaataatctattgtttcttcgattgtatcacatattgatcccattgctatgataactctatctgcatcttcagcaccatagtaattgaataggtgatattctcttcctgttattttgcttatttctcccatgtagtgctctaccatttctggaagtgcatcatagaatttattttgagcttcttttccttggaagtagatatctgaaccttcgttacttcctctttgaactggatgatccggatttaatgctcttcttctgaattcattaacagcatctacatcaagaagtcctcttaaatcttcataatccattacttcaactttttgaatttcatgtgaagttctgaatccatcaaagaagtttatgaaaggaactcttccctttatagcaactaaatgagctactgcagataaatccataacctcttgaacgcttccttctgcaagaagtgcgcatccagtttgtctagcagccattacgtcttgatgatctccatatatattcaatgagtgagtagctaaagctctagcacttacatggaatactccaggtaaaagttctcctgctatcttgtacatatttggaatcataagaagcaatccttgagaagctgtatatgtagtagttaaagctcctgcttgtaatgatccgtgaactgcaccagcagcacctgcctccgattgcatttccataatcttaactttttgtccgaaaagattttttcttccttgtgttgcccactcatctacgtgttctgccattggtgatgatggagtaataggatagatagctgcaacgtctgtaaacgcataagaaatatgagcagcagctgtatttccatccatagttttcatttttttcatgttgtataccccttcctacaaattttttattaggaattataggcaaaaatttgaaatttgcctataaaagcttaagagcttgttacgattttaactatactataaaatttttttcaaagcaaaacttctttttttctaattatcctgtgattaaatgagaaatacttgacatttcttcataaattacaatttttcatttaattgctcttttttgcttatttaatttttttgtgtacagcttttcattttatttattaaattgaattttttagtatttcaagcgctcattatattatatatatggattttaatattttcaataaaaattatctttttataaaaacttgcgtccagtatattttcccgcttctagatcttgcggctcctactcctatttctctatactgccttccaagaatattcgctctatgtcccggtgaattcatccatccattcatgacacttgctgcattattatatccatatgctatattctctcctgcagcagcataagacaagccataccttgttaaaagcgaaaaagttgatccaaaagtaggcgatgtatgagaaaaataatttttcatcatcatatctcttgattttactcttgcgatattaataagctgtgtatttgcttttaatggcgcaagcccatatttagccctctgactatttacaagttttataacttgactttcctctgctgccaaattacttgtttccagctgtgcactactttccctgcactgtttattgttaaactctccaaatactttctgcgcttctacacttccaccaaaggttgatgtaagtataaaaacagctacacaaatagaataaatttttttcatagattcaatcctcctaaaaataattttttattatttttagaattttacgaaataatattcatataaattgttatataacaattgtttaaaaaataacattcataaacataaaaaatccaagtgtaatattaacttctttactcctatttcctatattttacattttttatatttatcaataactttaattatattttccacaccattttttacaggacttgaattcatagctttcttgtatttttccttatcgctttcaagtttaatgaccttctctacaagcaacgttggtgttaagtcatcttcctgaaccaccatactgtaaccatttttttcaaatgacatagcatttaaaatctgatctcccctgcttgattttttagataatgggatcaataaattaggcttttttaatgctaaaagctcaaaaatagcattagcccctgctcttgaaataactaaatctgcagcattcattacatgaggaagttcagttgatatatagtcaaattgcttataccccttaagtttacttaaagcttcatctatatttccctttccacaaatatgaactatatcatatttttttataagcttatttaaagcttcacgaactgtatcatttataatctttgatcctaaacttccacctataatcataagtactggcttctcacctgtaaatccacatatttcaagtcccttaattttacttcccttaaataactcatctcgtataggagtacctgttaatattcccttattcccttttatattgttaagagattctggaaatgtagcacaaacttttgtgcagtaaggaactgctatcctatttgcaagtccaggtgttatatctgattcatgagctattaccggtattctgcaaaaatgtgctgctataaccacaggaactgacacaaaacctcctttagaaaagactatgttaggctttttcttccttaatatactaacagattgaaatatccctaaaataaccttaaaaggatctgaaaaatttttaatatcaatatatcttcttaattttccactggatatacaattatactttatattttctttttcaattatacttctttctatcccatcctttgttcctatatactctatttcgtatcctagctcctttagttttggcacaagtgctaaattaggggtaacatgtccagcagaacctccacccgtcattactattttcagttttttcataaccatactcctttttaaaatgtttctatgtaaattcgaaattattatctggtatataacagataataattttatactaactttttattagaaatagtttcatatctacctaaaatgttgtactattatttgaatatttacttttccattatattcatttatatcgggataaaatgctatatctaaataaatgttattttcgatgccactatacattttattcatttgttcactaccgtaattatttattactattttctcaaactcttctatatctccaaaatatattccatctatatatcttctattcttagaaagaaattttaattttaaaacattatgattttttcctataatccttgcactaactacctttgcttttttttctccaaacataggttttggattagactttccaaaaggctctagcatatttaactctttcacaaaatcataatttatatattcaaggggcatccccatatcaagtgttatcttaggtattaaatcctcggcgcttaatgtagtattttcgtttaatctttcccttaagcaatcaatattttctatctctaaagacaatcctgctgccataggatgtcctccaaatttcaaaagtatatctttacatttaattaattcctcaaacatattatatccttcaatagatcttcctgaacccttagcaccgttttccgtctttgtaagtactatagttggaacattatatttttctcttattctaccagcaactattccaactatactttcatgaatctcaggaacatatattacaaatactctatgatttttcatttcagtattctcaattaaatctattgcagtatctacacccttttgagtcatttcttttctttcattattaaaatcaaaaagttctttagaaagcctactagcttcatcttcattttcacttattaaaagttcaattcctcttttagcagagtccagtcttccagtagcatttatacatggtcctattacaaacccaagatgatatgtagaaattttcttatcttcgatatttgtctgtcttattagtgaccttaaaccaacattcctagtttcgttaagaagtttaagtccattcttaacaagaattctattttcatctactaaatcaacaacgtcacatactgttgcaatagcaacaaattgagacaaaccatagaattctttcttatgtattttaaattcatcataaagcacttctataagcttaaatacaactccagctccacataaacctttaaatgggtatttacactccttttgcttaggatttattattgcatctgcatttgaactaataaaacttctttgtccattttcctcttctataaaaggtatatcatgatgatccgttactataactgttaatttacactccttagcgtaattaattggttctattgctgcaattccgttatcacaggttattatagtatctacagaatcctctatacatttttctataatatgtatgtttattccatatccatctttaactctgtctggtatatcataatctacatctgccccacatctctttaatgctgtaaatagcaaataagtacttataacgccatctacatcataatctcctataattcttattcttttacctgaatctatcttgcttttcagtatttcagaagctctttttaagtccttcatatctttgggattatgcattttttcaaatcttgggttaagaaaactgtcaattaattttacatccttaattcctctattaataaggagtttacctataacctcacttattccaaatgctttagcaatagctttataatccgcttttatatttttcataaaccatttttccaactagttatccacttccttttccttttgcacacaaaattaaaagcggcggctatttaataatgccaccgccaactaaaagatcaccatcataaaacacaacagactgcccttttgttattgctcgctgcggtttctcaaatttcacttttacattttcatcatcaactggatatatagtagcctttgaagctttagcattgtatcttattttagcatcaacttccataggctctgtaagcttatcaaaaggtataaagttatttttaaatgaaattaactcattttcaaatatttcctcttcctctccaataacaacctgattcttcatagcatctatattagttacaaatactctttttcccgttgcaataccaagtccttttctctgtccaatagtatagtaaattattcctttatgttttcctaaaacttttccttctttatctacaaaatttcctgtcttaactgcctttggacattctctttttataaagccgccatgatcattatcaggtataaaacatatttcttcgctatccttcttgtcaaaaacattcagaccaatttcccttgcaatttcacgaatacggtctttcttataatctccacaaggcattaaggtatgtttaagctgatcttgagtcatattgtacataacatatgtctgatcttttttttcatcctctgattttcttattacataccttccattctcctctactattctgcagtaatgacctgtagcaatgtaatcagcgcctaaactttctgctttttttaaaagagcatcaaattttatatatttattacaagcaatacatggatttggagtttttccatttaaatattcctctgtaaaatagtctataactttttccttaaatatatctgtaaagttgacaacataaaaaggtattcctattctatatgcaactcttctagcatcctctactgctgaaagagaacaacaacctccctcttgttctgtgtagaaggcatcatctggtgtaagcttcatagttacacctataacatcatatccctgttcctttaaaaggtaagcagcaacagaactatcaactccaccgctcatacctataactacctttttattcatttatatcaccattcctttagctagtcaattcctttagtttatccactacatataaaatctcttcttctgtggtgaatcttcctatggtaaatcttattgaacttcttgcctcttccttagagagaccaattgctgtaagaacatgtgaagcttccattgcaccagcttggcaagcactacctgctgacgcacatataccattcatatctaaattaaataaaattccttcaccgtcttttccattaaaacataaatttatattatttgaaagtcttttttcatttaaaattccatttaactttacgtaaggcaattctaaagccttttcaacaaataagttccttaaattttcctgccttgtattttccttctcaatgtcatccgaaacaatttttagtgccttagctgctccgactattgctggaacattttcagttcctccacgtcttcctctttgttgtcccccgccgtatataatattacttacctttgttccttttcttatataaagtattccaattcccttaggaccatagaacttatgtgctgctaaactcaaaagatcagcatttatttgatctacatctattttaacatgacctgctgcttgaactgcatctgtatgaaaaattatattttttccctttaggtaatctcctatttccttcacaggctcaatagttccaatctcattatttgccatcattatagataccaaaatagtatcttttcttatatttttctttaattcttctatagaaacaagtccatttgagtcaacattaagatatgtcacctcaaagccttctccttctaaaaacttacaagagttaagtaccgcatggtgttctattgctgtggttattatatgttttcctttatccctatttgcaaaagctgatcctattatagcccagctatcaccttcacttcccccgcttgtaaaaaaaatttcatagggcttgcaattaataattttagaaacagttatcttagcttcatcaattgccatcttactttcatttgatagtgaatatatagaagctggattgccataaaattctgtaaaatacggcatcatttcctctactacttctttaagtactggtgttgtagcagaataatccatataaattgtctttttcattatatttatcatcctttactctataaacatatagagctgtttcaaaataaaatttgaaacagccctcatatttttattttattatattatactataacgaattaatcaaatacagacattgataaatatctttgaccgctatcaggaagaatcacaacaacattcttacccttgaattctggtcttgatgcaacctctttagccgcaaatagtgctgcacctgatgatattcctgcaagtattccctcttctctagcaagctctttggcagaagcaaatgcatcttcatttttaacttgaattatctcatctattaattctgcttcatatacatcaggaacaaatccggctcctattccctgaatcttgtgaggacctgcttttcctccagaaagtactggtgaagttgctggttctactgctataatttttatatctttatttttttctctaagagttttagcaatacctgttatagtaccacctgttcctactcctgcaactactgcatcaacttttccatcagtatcctcccatatttctattccagttgtaacttcatgtatagctggatttgatggatttttgaactgctgtggtataaaagaattaggattttcacttgcaagctcatttgcctttttaatagctcccgtcattccttcaactcctgaagtaagaactatttcagctccatatgctgtcaaaagctttcttctttcaacactcatagtttcaggcattgttaatataagcttatatccctttgctgctgctataaatgcaagaccaactccagtatttccgcttgttggttctattataactgtatccttatttattaacccctgttcttctgcattttttatcattgaatatgcaattctatcttttatgcttcctgatggattaaagtactctacctttcctagaatatttccctcaattttatttttttctttgtaatttgaaagttctactaatggagttcttccaatagtttcaattaagttcttatagattttacccataataaatcacctcatatttttattaaacacatttgtttactaggaatatgtattctaaaagtcacctataccttcatatagataactttatcaacgctaaatataatacatgtaacttgaatttagcacattattataatccataactaaatcctctaatgtaatagaaacaacaacttcttcgatagccatattaatcttagtccagacattaccccttataaaattatcaagcttatcttcctttaatatctcgttttcatctctttcaactactgaaagatcgccttctaaggcatttaatatgtccgctactgttatttctttcatactttttccaagtacatatccaccttgagaacctttccttcccttaactaaacctttctttctaagggcagaaaaaatttgttcaagatatccttctgatattttctctctctgagatatactttttaatgtaacaatatcattcactgaatttacagccaaatcaatcatagcctttaatccataacgtcctttagttgatattttcatatgcatttcacctatttatagtttttttattgaattactatgttttaatattacgactaaaaattttacttgtcaagtagaattttctttttaaatttttaagatttttaagattttttataataataatttccaaaatttaatattattatttatgtataaatcattcttttttgaatggaattattgtaaaatagaattgtcgctttgttattttattgaattaattaaaataattggaatttatctttttattatacttgattcggggagggtttattttgtcaaagaaagaaattatagctatgattcttgcaggtggtcaaggaagcagactcggtatacttactagaagaacagcaaaacctgcagtaccatttggtggtaaatatagaattattgattttacactaagtaattgttctaactccggaatagatactgtaggagttttaactcaatacaagccattagcactaaattctcatataggtatcggaagtccatgggatttagatagaaccagcggtggagtgagcgttcttcctccatacatgaaggagactgggggaaattggtacaaaggaactgccaatgctatttatcaaaacagacattttatagagaattatgatcctgaatacgtggtcatattatcgggagatcacatatataagatgaactatttagaaatgcttgatttccataagaaaaaaaatgctgatgcaacaattgctgtattcgaagttcctttaaatgaagccagcagattcggcattatgaacactgacgaagacgatagaataaatgaatttgaagaaaagccaaaaaaaccaaaaaacaatctagcttctatgggcatatatattttcaactggagattccttaaaagatttttagaagaagatgcaagagatgaatcctcaaacaatgatttcggcaaaaatataattcctaatatgcttaataaaaaaagaaaactctatgcctatagatttaatggctattggaaagatgttggtacaattcaaagcttatgggaagccaatatggatttattagatgataacaatagtttaaatatatatgatcctaaatggaaaatttattctgtaaaccctactatgcctcctcaatacatagcctgcaattccgatgtgaaaagatctttggtggttgaaggatgtatagtattagggaaagtatacaattctgtgttatttcctggtgtttatattggaagggatacaattataacaaattccgtaatcatgccaaatgtaatcgtaggtaataatgtaattattaaaaaatctataataggtagtaatgcaagagtagatgataacgtaattgtaggtactaatgacaatatctctgtggtaggtgcaggaagtaaagtaaaggaaagcattatacaataaatacatttggagggaattaaaatgctaaataactatatgtcaattctaagcttaaatgaaaatgataatgatataaaaagtcttacaaaagcaaggcctctagcctccatcccaattgcaggaagatacagaattatagattttatactttccaatcttgtaaattcaggagttaaaaatattggtatattaactcagtgtaaatcaagatctctactcgaccatcttggatcaggtaaaccttgggatttagatcgaaaattaaatggcttatttatatttaattttagtggtataacttctactctaagcgatatagaaatgttaaaaagtaatatggagtatttatatagaagcacacaggagaaagtaatcctctcctcatctgcagttatatgcaacatagattttcaaagagctgcagaatttcatgaaaagtctggtaaagacataacccttatatacaaaagaaccaataatggtaaacgaaaatttttaaactgcagtgtattaaatatggataaaaacaataatgttataagtattggcaaaaataccggtttagatgatgtacagaatatatctcttggcatgtttatcatgaataaaaagttattgataaacatattaaataattgtataagaaccggattttcacttagcttaaaacaatgtatccgtaagcatatgaataatttcaccgtaaatgcttatgaatttaatggctatgcagagtatatagattcagtaaaatcttactataaagtcaatatggatatgctaaaccttgacattaacagagaggttttctttaaaaatggtcttatatacactaaagtaaaagatgaggctccaacaaaatactttaatgactctgaggtatgtaactcccttatagcaaacggttctttaatacacggacaaattgaaaatagtataatcggaagaagagttactatttctaagggagctagaattaaaaattgcgttataatgcaaaattgcacaataaaagaaaatgtggatttaactaacgttatagtagataaaaatgtaataatcgatgaaaacacagttctaaaaggaggaaaagaattccctcttgttatagaaaaaaaatccatttactctgaagtttaattttctgatttcaaaaataatagaagcttatttacttttttctataaataataaagggggaaaccaatttgaaaattttatttgcttcttctgaaagttatccttttataaaaacaggtgggcttggtgatgtatcctatgcccttcctaaagctttaagaaaaataggaattgatgcaagagtaataattccaaaatattcagatatacctgaatactttagatataatactcaccatattgcaagttttggtgttccagttggctggaggagtcagtatggaggccttgaatactatgaatacgatggagttcctttttacttcatagataacgactactatttcaaaagatctggactttatggatactatgatgatggagaacgcttcgcctatttttcaagaggagtacttcaagccataacttatatgcaggactttaatccagatattattcaatgcaacgattggcaaacagcgataatacctgttcttcttaaagatcattatcgaaattacagaaactataatcatataaaaactatatttacaatacacaatctaaaatatcaaggtgtttttggaaaatcagtacttggagagcttttgtgtttaaatgaaggctattataacgaaaatgcattaaagttttacgatggtatttcctttatgaaaggcggtattttattttcagataaactttcaactgtaagcagaacttatgctgaagaaattaaagacccttattatggagaacatcttgatggcttacttagaagtcgttcttatgacttatggggtattgtaaatggaattgattacgatatattaaatcctgaaacagacaaagacttgttttttaattttgattcttcaaccttgtataataaaacaaaaaataaaatagagcttcaaaaaatgctgaatttacctgtgtcagaaaatataccaatgataggtatagtctctagacttgtaagtcaaaaaggtttagatttaatttcctgcgttttagaagacttacttcaagatggaatacaacttgtagtacttggtactggtgatgctaaatatgaaaatatgtttaaatatttcgcatggaagtacccaaataaactatctgcaaatattcaattcaataacagcttagctcaaaaaatatatggtgcatccgatatgttcttaatgccttcaaaattcgaaccttgtggtataggacaattaatagctcttagatacggtagtctccctatagtacgtgagacaggaggtcttaaagacactgtaagaccttttaatccaataacaggtgaaggaaatggtttctcttttaccaattataatgcacatgatatgctgcatgttataagaaatgcagaatatttctattacaacgaaaaatacaattggaataagcttgtacaaactgcaatgaatgatgataacagttggagtaaatcagcagaaatttacagaaatttgtacatgtcagtactttaattataattttttaattagggaggattttacattatggcaaaaacaacatccaaaaaaactcagactaacacaaaaagctcatctaaaactgtaaaaacttctgcttctattactgaagcttctaaaaaaaaatcaagtgcgcctactaaaagggttgcaaaatctagagctactgctaaaaatcaaaccatatctaatgataaaaagcctaaaaagactaaagttgttaaatcagtagattttgttgacgttacatttattttaaacaaaacttcaacttctataggtgaaaatatatttatttctggaaatataaaagaattaggcaattggactatagataatgcaattaaacttagtacagacgaatcaatatatccaacctggaaaactcaaattaaacttccgataaacacagaagttgaattcaaatttttactattaaaagaaggagaagataaaaattctgcagtttgggagaattcgggtaatagaattttaattgtcactgaaaacactaaagtatatgaatgtgattgggcttaagttttccctttacttactatatataaaggcaggaaattaacatattgtgaaagttaatttcctgcctttatattattttttaagaattctaagtgaatttaatactgctagcagtgcaacaccaacatctgcaaaaacagcttcccacatatttgaaataccaagtattgttagcagcaatacaatagcttttacacctaaagccaatactatattctgccatactatacttctagtactttttgctattaacacggcttcatatattttatatggttcatctgtcattataaccacatcagaggcctctactgcagcatctgatccaaaactccccatggaaattccaacgtcagctctagcaagcaccggtgcatcatttattccatccccaacaaatgcaacccttcctgacatgttaccctcaaatatcttttccatattatatactttatcttgaggtaagagctcgtacttaacatcatctatccctattttctgcgaaaccttaagcgctgcttttttattatcaccagtaaacattataggctttatatttattctttttaatgcctcaatagcttttattgtatcttcttttaatttatctgatattagaatacttcctacaaaacttccttcacatgaaacataaattactgttccaatatcatttctaaaagcttcttctttaacatctatattttccttcagcattaacttttcattaccaacaaatactaattttccattaacgtaagcctgtataccatgtcctgcaatttccttatattctttaatttcagcttcatcatttttctgaccataagcctctactattgaaacggctataggatgattagaaaaagcctcaacacttgccgccagctttaaaacatccttttcatcaaatccattgtaagcttgtatcttatctacgctaaaggttcctttagttaaagttcctgttttatcaaaaaccatagtactaacatcattcaatatttctaaatagtttccacccttaaccaaaattccctttttggatgcagctcctattcctccaaaaaaacttaatggaattgatattacaagtgcacacggacacgaaactacaagaaatacaagtgccttgtagatccagctagaaaaagatgcattcttaataaaaagcggtggtaatacagctataaaaagtgctgaaaaaacaactatcggagtataatacttagcaaacttagttataaacttttctgtatcagctttcctactcgaagcattttcaactaaatttaaaatttttgataccgcagaattttcaaaggttcttttaacctttacagtaattaatccttccttattaatataaccagaaaatacttcttcgcctggctttatagatttaggaactggttctcctgttatagctgatgtgtcaaaaaaggatacaccctctgtaataacaccatctagtggtactttttctccaggctttaccacaataaaatcatctattctaacttcttcaggattaacctttttaagctctgatccatttttaacatttgcaaactctgcttttatattaagaagactctttattgatttccttgatctttcaacagctttatcttgaaaaaattctcctatttcataaaataacattacagaaactgcttccggaaactcttttatagcaaaggcaccaaccgtagctactgtcataagaaaattttcatcaaatatttctcctcttcttatattccttatggattttaaaataacttctccaccaattaaaacataactaattaaaaataaaacaataccaaatttctgttcttttaggatatatgctaaagcaaaaataacaattcccatagatagccttattatgtcctttttctttaaaccttcatcctcttgttcgctttctacttcctttaaatccacatctggctctacagcctttactatctccctaactttattaaagacctttttttcttcacttccatctttaatttgaaaggtaagctttttaaaaacgaaatctaagttcgcttcctcaatttcatttaatcctctaactctctcctcaatcttagcagcacagtttgcgcagtctattccttctacataatattgtttttttataccactactttccataaaatcaactcctactcacttttcatttatgtgcataagtcccatattaaatatttcctttatatgctcatcatcaagagaataataaacaacctttccctctctcctgtacttaaccaattttgactgtcttaatatttttagctgatgagatattgcagactgcttcatctgaagtaaataagctatatcacatacacacatttcttccttaaaaagagcacaaattatttttattcttgtactatctccaaacaccttaaataaatcagaaagctcgtacaattcttcatcctcaggcatttgttttctaactttttctactgtatctacatgtattacatttgcttcacacagatcactattattttgattttgagacatggaaatcatctcctcttaaaattcatatgaatatatgttcatatgaatatattaacattatattcgcaataattcaatatgttgcgtaaaatttccattgaataaaaaaagaaccttaatcagttttctcttatagtctataactttatattttcatattgttccaaacaacccaaaaacacatcgattacacactgtagaattatatatacacttctaatatgtagcaattaaatttaaataagcatactataattttatagagttttttaaaagtataaagaagaatggtgatattatgtgtggaatagctggatttgttaatttcaaaaaaaacttgattgacaaaaaaagtattatagaagatatgactaatactcttataaagagggggccaaatgaaaaaggctactatatatcaaaaaatgctcttttgggccacagacgtcttatcgttgtagaccctaaaggtggtagtcaaccaatgataaaaatacacaatggaaaaaagtatattatagtttataatggcgagttatataatactgaggacatacgaaaggagcttttagaagcaggttatgaattttcatcatactctgatacagaagttcttttaacttcctacattcattggaaagaagattgcgtaaatcatataaatggaatttttgcttttgcgatatactctgaaactgataaaaaaatttttcttgcaagggatccattaggagtaaaacctttattttatacaataaaaaataacaacttaatatttggatctgaaataaaaactcttcttgcaaatcctcttgttgaaccaattttaacaaaagagggtttaacagaaatttttgcactaggtcctgctagaaatctcggcagtggagttttaaaagatattcatgaaattccacctgcaaactttatagagtttacggagcacaaattcaagcttcatgaatattggcgcttaagctgtaagcctcatactgaaaatgcaagtgaaacagcagagcatataaagtttcttcttacagatgcaataaaacgtcaactatatgcagacgtacccgtatgtacttttctttcaggaggacttgactccagcataatttcagctgtagctgcaagtgaattcaaaaaacatggaaaaactttaaatacttattctattgattataaagataataacctatactttaaaaacgataactttgtaataactcctgatagtgtctgggctgaaaaaatgcgtaaatttataggcagtaatcatcacaaaataataaataataatttagatttagcatctgcattatatgatgctgtaaaggcaaatgacattcccggtatggccgacatagactcttctctctttttattctgtaaaggtgttgctgaaaaaaatgtagtttcactatcaggtgaacgtgcaatacagatgataactaatctagttaaacaatttataaatataggggagttataagaacgttataactcccctaataaaaatagtttttctaaataatattataatgctttagagcatactcaattccgtcttccattatatctttagtaacaaaggctaccaaatcaaataaacctttactactatttcccatagctatactattagggacatactgaagcattggaagatcattcaagctatctcctagagcataacaatcttcaataggtatattaaaatagtcctgtaaaaacttaattcctgttgcttttgaatatcctttaagaactatttctccaaactctccttcttcatcttctctatcaatgtaatcaaaatcattagaaatatgagatttaaaagcttccaaattgctttcttttcttgtccatataacgaacttatcaaatacaatatcagaatcatcccaagacttactaacatcataaccacgttttccaaatttactttttagctcaagagttttttctgaaacaggttctctttgatcaaagaaaaaatccttttgcccttctaaaagtgcatcaagcttacactcacgaagcttttcaactatttctacgcatcttttatgagaaatagacttttccaaaagagtttgtccattaatatgtatataagttccgcacccgcaaacataaccatcaaaaccaatttgcctaatactatccggaacattaaaaaaagttcttcctgtatttataaatacaaggtgaccattgcttctagccttttttatggcagctattgttccttctggaattacatgtgttttttcatccactatagttccatcaatatcaaaaaaaatcatctttttattcatctaatatatctcctctactcttcattagtaaaatatttaattaatataaaacctaattatagattttctttaatttcaaattctatttcctttgacaaagtccttcttacgggacacttttttgcaatatcaataactctgtgtttaatttcataagaaatatcacctaagatatctacattatataagaatttaactttagtatcatcacttttatctaaatcaaccttaacgataacattatcatactttatgttcttatgttccaatatcattcttatagttatattaagacatgaagcaagagaagcacatagtaaatcgtggggaccaaaactttccccatttcctcctttttcttttgtaacatctgaaaaaataactgcattactactaaaaatttttgtatagtaattttctttttcactttcagaaataatcataaaaatcctctcctacttattgttattaagaaaagtaaataccttattgaaatatggaaccattatactatccttttctctatatatttcatgctttgaattcttaatcactattagtttacacttcttagcttcttttgcaaacttatcttgtcctcctggccttactatatcatcattttcggcttgaaataacaacactggaatagttacttttgatgcattttttccgtctgtaacctcatctgttgcctttaaagattcctttacccacttaaacgaagctccaccattttcaatttttctactcttgttagttttatctaaataataatcatatctaatattacttgttgtgcaggaattttcaaaatccgattcacaagaatactcatggtgaccaggagcatatgtatctcctaaattcacaaagttaaatacacttgcaacagctcttgacaaaaattcagggtatcttcccgtatctacctcaaacattggagaacttaaaactgcggctttgaaatatttaggatacctttctagaaataagcctccaattgctcctcccatagaatgtgcatataagaataaatttttccctctattatccggttctactatagtatcaacatattttttaaaatcatctacataataatcaaaattatctacacttgtttgtgttgaatcttttcctaatctacctgatcttgcatggcctctatgttccaatccatatacggaatatccatttttcaaaaaataatatattgtttcattatactttaccatactctccctaaacccatgggatattacaattgaattctttgaatttggtataacatatttttcgtagtaaatatctatattttcctttccaataaaatgccctgattctcgcctagcactaagataattttcaacttgctttatttctcttttatagtttttttcacttatataatactctttaggttttccatcaatcatagaattatcctcttcagatgctatggtcctatcccaagctgaatttccaagaataaaaattgttgttacagcaaaaatcaaaaaaaccttcttacttaacttcctcatataaaactcctcaatacaaataattttgcaatagaagttacaccttacgtattgtttaatctattgctatttgtgaaatttctacttatttcactctatataatactaaaataaaattataaattattataactgttcttgcaatgcagaaatattgtaaactattaagaaacacctaagtgaaatcactttataatgctgtcaatgtttaccttaagtctaaattccaagtgcttatttttatatactataattttatcaagtactctttcaacgtcctcacgttttagattttcagactcaattatattatcaaaaacctgtagagcgttctttaaactattatcacacttcaaattattttctacattgaatttttcaatttcctgtgttaattttagaatatttttctttttttctttttccatcctgacataagcttcttctattatttttttatattgtttattatcctcccttgatatatcctttatttttttacataaaataaatctaagttcttctttctcaatataaagctgcttttgcatttttgataaactactcctcataaagtcttcctttttatcaatattaatcttcaggatatactccttgtattttcttctaatatctcttaaaaactctttaaaaaagaataaaacttcatgttcacttacagaatgattgctgcatattttatttccatatctcctatacattctgcaattataacctctttcaattttaggatatgcttttaaattacatccaacaacagcatatccacattctccgcactgcataaatcccctaaatatatagttgtattttgctttcccgctaaactttattctattccttcttagatttatttcctgagctaatgcgaattcctcttttgttattattgcttcatgatgattttcaaaaacatattgttcttccttaggtaccttctcctcctttcctttaatcattttaacttgccttttctttgtcctaagtattcctatataaatatcgtttttaattatcctatttatcatatacgcttgccatctatgagccacattatttttaaatactctcccattgtttgcatgctttttttgcatacattcacttggagttgaatatccatttccatttaacaaatcacatatttttttatacccaaatccctttatgtaatatttaaaaataagctgtattataggtcttatttcttcatctactataagggtaacttcatcttcgactttaatcttcttataaccatatatattcccaattattaacttacccttcttttgttttaaatgcatacttgctcttatttttctagaaatatccttaacatacatctcattgtaccaagtttttatcccaagtatatcgtaattgtcctctagtaaatctaatcctcctgttgcttcttctactaatatgagcctaatgcctttttcttttagtttatctataaatactagaaccttgccattgtttcttccaatacgtgataaatctttagctacaattacatcaatttttctttcctttatttcatacatcattttcaaaaattcaggtctttcaaaagtatatcctgaacaattatcatccacatatatcctattaaccgtccaatttttattttttgagtactcttcaataatgtttttttgagtaattattgaactatagttttccttatcttcatccctacttaaccttacataacctactacattcataatattaccctaccttaaaacacaaacttgagatttgcctcacagactttcttgaaccatatcctttataactttttctatattcttgcgtccacttacaaacactgcaacacttgaatagccttccttatattctattattttttcctttataatattatcctcaacttcagcttgagttaaataaattataagggcctctttatttctatattttactttttttaatctcatctaaaactccagataattgcttattatattatattaatctaaagtatgttttgttacagaaatatacctgtttatttacacggtattatcttggcactatgtatttttgaaattttgagataaatatatctatccttatgtaactacgtgtaagtttgattgttatcaccagctttgcgctatcaggtgaatgtgcagatgaaatatttggaggttatccttggttcatgagaaaagaaatgatatatgctaacacttttccatggtctagatttgtaaatgagagaataagccttttatccgatgatttaaagtctataaatcttcaagaatatgtagatgcaagatataaagaaaacttaaataatgttcctgtttctgatgaggatagtccttatgccaaaagaatgcgtgaactcttctatttaaatataaagtggtttatgataacccttcttactagaaaagataggatgagcatggcaaatagtcttgaagttagagttccttttgctgattataggctagttgaatacgcttttaatatacctccagaaattaaatttttaaacggaagagaaaagggaattctaagaaaagcttttgagggcgttctacctcaagacgttatagaaagaaagaagagtccttatccaaagacttttgatcctagatacacagctttggttcaaaaatggttaaaaaaagtggtagaggataagacatctcctattttagatataatagatttaaaaactgtaaatgagctcattgaaactggcggctcttcttacaaaacaccttggtttggtcaactcatgaagggacctcaattaatagcctatcttcttcaggtaaatttttggcttaaagaatataaaataaaaatgatataaatagtccccgtatatttatatatgataatatacggggttattaaaatactatttgtttatgttgagtagatattccttaagttcactgtttagtttatcatttttaagtgcaaaatctatatttgcctctataaatccaagtttatctccaatatcatatcttttgccatcaaaacaatatgaatatattgcttctctctttagcaattcttctaatgcatctgtaagctgaacttctccaccttttccaggttttgtattttccagtataggaaatatagttggcgttataatataccttccaagaatagctatattagaaggtgccatttctatactaggcttttcaactaaatttttgaccttgcatattttattttctatgtttattccatccacaattccatatttacaaacatccttctttcttacttcctgaactcctaatatagacgtattatatctatcatagcagtccataagctgctttaaacaggggactttactgtccactatatcgtccccaagcataactgcaaaagcttcatttcctgcaaaactttttgccaaactaatagcatgtcctaatcccataggctccttttggcgcacatagtatatgttaaccatattacttacctgcctaaccatccgaagaagttcttccttatggttattttttagttcttcttcaagctctgccgatttgtcaaaatgatcttctattgattttttatttcttccaattattataagtatttcttcaattcctgataaagctgcctcttcaactatatactgtattgtaggtttatcaactataggtaacatttcctttggctgagcttttgtagctggaaggaaccttgttcctaaacctgctgctggaatcacagcttttcttatgctcatatattaccacctcttaataaaattttacttatctttagaactatctgtataagcttttaaatcatataattgttcttgattcattcccataccaaaactcctatttttagaatctgacttactcgtattgttatctaaagttttattagctgtactagatttagtactttgattactatattctcttgtagaaactttcttacctacactcttaacccaattcattatttcactactggagtttcctcccattccaccggtcattacatatcttatttctccctttttaaccattcccttaaattgagctagtgtaaggattttatcacttccaaggaatccacccagagacattaccgactctcctgtgctaactattatctcagatgcagagttggaattttcaactaccaataaatacttttgacttgtagttttattctcttttaagaaattaataagttttaaattagaagaattttccttatcaggcataacgcccattcctcctccaattttagatttgctattacttgacagaagctctaaacctgccactggcattgaattattaactttatttataagtactgctcctgaccctacaagtggtgttattattattccaactagagctaaggatactgcatttctcttaatattctttaaatctcctattgtcttacccgttatattaaatataacaagtgctactgctggaagaatatttaatataatcactaagatcattaatacttttgcaatgtctaatgaagtcatgaagtaagaaagcataataatctgagacgctccacttataagtaatgctgccggtaataggtatgccttaaaaccaccttccttataaatctcccataaagaagtaattcctattcccgctaaagctgctgttggaggcgcaaacattgtcaaataataggggtgccatgtacctgtattaaagctaaaatatataaactcaggtaaaaaccacataaaccacattactatagcttgttttttcttattatcaagacttaaccttaatttttcttttaaaacagatgctataaatccaaatatagcaagaggtataaaccatactacttgatctgcaagtgtattacctaagaatagtcttgttaatccagcagtaacagttccaccaaacattgctgtttgaaattttgaagaattactgctttgtccattaaaaccaccttgcatattgccacctggtcctccttgattaataggaccaccatgcataccagtatttgaagcacttggcggatttcctgacctattgccattcttactacttgggacacctggcatattaccattcttactgctagtacctgacatatgtcttcccacacctggaccaccattgctaccttgagaaccaaatgacagcctttctgtaccattatgcccaagtatcagctccattactgtgttattggtactactatcaacatatggtctgcttgaagctggaactaaatcaacaataaatgcccaggacaaagaaacaactactaatacaagagttccacaaactaaatgtatcaatcttttcttgattgacacagctgttgtaagaagatatgttatatatatagctgggataaccaaatatgcctcaaccatttttacattaaaaccaacaccaacaagcgccaaacttataattaaatatttaattttccctttttcagctgcaattgtaagtgcccacaaggctaataacaaaaacattataagtatattatctatggtattatttctgcttactgccacaaaaattggtgttattgagagaaacaatgctgataataatgctgatatacttccaaattgccttttaacaattttatatattaatattacagaaattacccctgccgctgctgaaggtaataatatgcttactccactaaatccaaatattttggcagatattgcttgaagccagaaacctactggtggtttgtcaattgttacgaatcctgctggatcaaaagacacaaagaagaaatttttcaaactcatagtcatgctttttacagcagatgcataatatgcgtttccatacccttctatgcttaaattaaagaaatttagtactgcagatattagtacaattatacataatgctattccttctttagtaatcttaaccttcttcatttaatactcactcctctatagttgtactcttaaataataattgccttagttactttatgtaaggattataacttaaatttactgtacaaatatcaaaattttatgtgaaacttatgtgattactgcaatataaaaaatcggccttacattacataagaccgattctcacattaacatattttgggtgtatgtttgatattttaatattctaagttactttatatttataattttatctaaggcaaggaggaagtaaatttattgtagcagcatcgcataatgaattaacattataattaacagttttagaattaatctttaaagctgctttagctattgattctacatcaggattacttttataccatgtaccattttcataccattcttctcctgtaacatcgtaacctggttgattccttcctggggtttggttgattttatcattaaatagtacttttgcactacttaacccattaatagtatatgagtaccatccattgccatcactattcatttttactcctggccaacctggtcctgtttgtccagaactagtatagtagtatacatatggtgctccccaaccgcttggatttttgaagtgtactgttatgatgtttccaactgtatttatattatatacctctgtatatacatcagattgatttccttgtgatcctactgcaataaatttaagtgtagtagttgaatttattgtgattggtgctgtatattttgcgctattaacagttggtgttgtgccatctaaggtatagtatattgttgcatctgaatttgatgctgtaagagttaccgtctgtgcattcttataggttccacctttaacactagcacttgcactgatatctggattagcttgatacaatttaccattctcataccactcttcccctgtaacatcaattcctggctgatttacacctgggatttgattagttccgtcatcaaatagtacctttgcactcgtccagttctgaatagtatatgaataccatccattaccatcactattcatttttactcctggccaacctggtcctgttaactttcctgcagggtcatagtaatatatattaggtgctgaccaaccatttggatctttaaagtgaacctttattccatctcctactttaagcacattatatacttctgtataaatttgagattgattaccagaagcatctacagctaaaaaattaagctgttgcttacttgaacttgggttaagtgtaattggtgctatatattttgtactattaacagttggtgttgtaccatctagtgtatagtatattgttgcatctgattttgaagctgtaagtgacactgtttgaggtccataataagttcctcctttaggatttgcagctgctgtaattgttacaggtaaaggattacaagatacatttatattttttgcatctcctgatgaaacctttatatatacaacatttccataggtgtcagttcctgatgcatatccttctcctgaagcactctttaatgcatcatagcttgaatattgcgttaatgcctgtccgttagcagtaacagctccattaccctttacatgcattttaactatatagtcttttaaatcaggagtatagcttcccgtatttttatctatgttaaattgtacagattttgaatcagtagaagtttgaagggtcatcttttgatcaaaataagagccattttcataatcataactagttccatcatcatcatagtagtcaaaggttgtagctttatcacttggaaaagcatctacataaacgtcagttattttcttttcacctacatagttttcaaaatcttgtgtaggaataattgctccgctctttataaatagaggtatatcactccaattagttgaatctacagcatagtttatagtttgtccacctgtatattctcttcctgttgtatagtctatccaatttccctctggcaagtatatactttttgaagtttgaccttgatttactacaggtgatacaagcatataatctccaaacatccaagcttccttatcatttgctgcattagaatcattagggtattccatcataagtgatcttacaagtcctaatccagattgtgatgcacttctatcatatgaatatatatatggtattaaagtgtatcttaactgcatagctttctttgcagcggcctctgcagttgaaccaaatgcccatggataacgcaccctattatcttgtccatgaactctaaatataggtgtaaatgcactgaattccatccatcttgcataattttcaggtgtcggatctccatcattgaagccacctgtatccattccccatttagcttctcctaaattaactgctgaaagcattctttcacgttgatttgccatactatcaaaaccagtagatatatcaccagaccacattccataacaatatctttgtgctccagcatagtagtttctattaagtgaccacactctttgatttttataagccctttgtccatcatatatagctctttccatattcatattgccaaagtttccaaaattaacattttcatcacattcatcattccaaaaacctacaatacctttatcaaaagcatcttgaatgttattccaccaccattttctaacatctgaaattgcaaaattaacgttttccatcattttaccagagcagtaatccgaagctgcactgtctcctggaagccaccagccttttgatgttacatatctagcctgctctgaatctgcaagaattcttggtttcattatacctgtcatcttaagtcctttagaatccatataagcctttaactgaccattttgggcatcaggaaagttatctgtattccatttaaattcaccatagttatcttgcccccattttttccattcaaaatcaagacagaagttatcaataggtatttgcttagaacgataggtatttagcacacttttaagtttatcttcatcatttcctgttccggatagtgaattattccaaccccattgagtgtttgtaaaaccggttgcccatttaggaaacattggtgctttacctgatacatctgattcctcagaaataacttccttaggacttccaagcattaaataatagtctgtatctgttttggaaataccactatattgaagtgatgtatctccaattgtaaaacttcctccatctgaatccacaagtaatccataaccatcattactccatacaaatggtgaaccgcagtgtccttgatatccagcataaacagattctgtaccatttctaagcattcctttatttgaatcttctttgaaattatatccgtttattccataaaatctatctcctgaattatgagtaaaacttacgcttttactagcaatagattgctgcttaactatttgtttaccagtagaatcatatacactcattgttaaatcagacttacttattttaattgtcattttttgagttgtaattaccattggatctgaatttaaatcactagatattatatttccagtattccaaattttatttggatcaactaccaaagtatcagaactagattgacccgatggtttataatcaacttttaaaacttgaggttcacatattttaatatccgtctcatctaaaccgtttacaatttgtagagtatcaccatttaattttgcagataaatttgatactctagcattttctttgactgttttaattttagatatcgttttcatattaggcgctgcttttgcactcacaggtcttataatttcaggcacagtatttaatgttaacgctgctgcaacaaaataatatagggtctttttccaaacttttttcttaccactatacatttaattttcccccttttaaacttctcaaacctatgtggtagtatatatatataatttttataaagttcttgcaatcgatttcacgaatgtgtcgaataaaactttttagtctttcttttaggtatgaattttttttaattttttcacctcctagtataatttaagtcaaactttcatgtatttttttacatcttttctataagtaaccttgactttaccttaattatacctttaatttctataaatgtaaatcaccttttttatatttattgtatcaaattccatatttaatatgtttttaatgcaaccaatttcattaaattgttaaatctccaattttcttatctttctatattcttatgcatatcttaacttaacctaacggcttttctaagataatattttatagatttatttaaaatgtatataatagcactaaaaatcatgtaaaatttttcagaaagcattcgttgtaaaagcttttaacatattgtaaaatatacttggtaattatacataataaatccaatacctttagaagggataacttaactatggaaaattttctttctttatttgattttttcaaatctaaaataagatacatttttttaatttatactatatttaccatttacatgaattctaaaaactgtttcattaattatgttttattgatctttctcgacgttattttaatcatatacagctttatatttttaaataaaaaacagaaatatccttttctctttataattatatcaaccattgtttatgcttttatttggttatttggtcactgtgataatatatattattttattattttagacgacatatttgaaattaaagctgacttcaagaaaaagctccttgtagctattcattcctcagcttttatgatggtaactttaaaaaacttaatttttaaaaattatgatttacatgaaatactcagttcaatagcatattcaattataatatatatggctattctatttgtctttatttttatccacaagtttaaagatgaacgagacaagcttaaaatactaaactctaatttaatagaatattcttttaatgagagagaatttttattatcagaagaaaggaacagaatttctcaagaattacatgattctataggtcactctctaatggcactttcaatgaatatcaagtatctaaagggtattaaaaacagatcaaatattaacgaagaattagacaatatggacaaagttataaaggaaagtgtacaaactctacgttctacagtttataatttaaaaaaactagatgaatgctgtgatttaaaaaaggaagtttatgatataataaagaaatttaatagacttgatatagtaaaaataaattttgactgcgctagtgatatagaaaaatcaactaccacaataaagaatactcttataaagacaataaaagaaggtataaccaatagtttaaaacatggtaatccaactgaaattaatgtcaccttaactttagtaaactcatatataaaattaattatacaggataatggagtaggctgccaaaacataaagccttcagctggacttaatggaataaaaaaaagaattgaagctttaaatggaaaagtagcttttgaaagcaaggctagaaaaggtttcactatagaaactgaaataccaggaggattttaaatgattagagttatgatagccgacgatcaagtgattgttagagaaggcttaaaaaaaatattaagtcttgatgatgaaatagaagtaatttgtgaagctgaagatggctatgatgtcattaataagcttagggaacatattgttgatatcatacttatggatgttagaatgccaaaaatggatggaataaaaacaaccaacttagtaaaaaaacaatatcccaaaatcaatataataattcttacaaccttcgatgaagatgaatatatatttaatggaattaaaagtggaattagcggttaccttctaaaagacagtgaaatagattatatacttaaaagtgtcaaggaagcttataataataaaatgatgtttgatccagtggtaacaccgaagcttgtaaatgcattaaatttatcaaataatatcaatagtactaataaggaaattttaagtgtccttactgaaagagaaatggaaataactaaattagtgacatcaggaaaaagcaataaagaaatatctgaaactctatttatttcagaaggcactgtaaaaaattatatatctaaaatacttaagaaactaaaacttcagagaaggacacaacttttagccatttttataaatgatgaaacttaattccataaaaataggtatatgtgttactaaagtaatatatatacctatttttttatatcacttgttacttaactcatcttcaaatcactttaattaaattatacattataaatataagttttaattcgaggtgattttatgaatatattaactaaatttattacaaaatctattttagaaaaaaaatcaagagcttttctcattatattttctatacttataagtactactcttttagttgcttctcttggcatctctgattccataacaactaactataggaatcttttaaaagggtcttacgaagatttcaatatagtaataaattcaaatgaaaaggctcaaactccattttttactctctctaatgttcattgctcaaatataaaaaataactttaaaacctgtgaggtaagtggctatttgaaaaataatgataatgagcaatttaatatgcttggtacttcccttaatgattttaagaaatttaaaaatataagacttctaaaatcaaaaaatctagaaccctttactgggaataagctaattatatctgagagcataagtaataaactaaatcttaaattaggaagcaaaataaccttaaacactcttggcaaggaaaatgaatatattatttcagcaatagcttcaaataatagcttatttttaagcgattcaaaggaaaagttcactttagtaactcctaccgaaaccacatgctctatttatggtaaaaatgtaggatatacaaatctatatacctctattgataaatcaaatataaataaatggattaaaaaatttaatactactaacccaaatttaagcgcaagagtattactagatgatagtaatcttgaatctcaattaaatactataaaaacttgtcttctatttatgctgtgtatagttttaattatgagtacccttataatatatagttcatttaaattgatagtactggaaagaatacctcttataggcactcttttaagccaaggagcaactaaactcagcataataattaccttctttaaagaaagttttatatatggatttttaggaggtttaattggaaatattctaggatatgctattttatatttaactgtagctttaagtaatccactaaaaaatcaaggtattgctgctaaatttaatttaaactatatatatttactgtacgggtttattttttctgtgacaatttcagtgatttcatcattaattcctatacttgctataagaaaatttccggtaaaagaaattatcttaaataattttgtaagcactaaagtgtcatataaaaagagtttcattgtaggaacttttcttatatttctatctatagcgtctcattttactggagaaaatttaggaagcttgcgcccttatataatgtctcttcctgctttttttatgtgcttcttaggtataattttaataataccaggcataaccattcttgttacattcccatttattaaactaagtaaaaatataaatgtacttcctatgcttgcattaaataatataagaacttcaaaggtacttttaaataatataagacttatctctatatcgcttatgacaattatgatggttatgtctatgactaattctttaaaagataccctgacagaagtctataaaaatttaaactttgatgtttctatagatataaattctcaaaatgtggatgtactaaaaaaatgcagcgaaattataaacaattatgacaagaaaaccaatgtaataagacgtaaatatatcaatacaaacttaaacaacgatttttctaagaaaatagatctactatgcgtagatccaaataattttaaaagctacgacaattatttagtctatactaataaaaataaacaacttgatcaattaaataataatgaagatggtattatcatttctgagaaaaattcaagaagatataacttaaaaaaaggagatacaattagcttatattcctctaatagtgaaaaagaagatttcaaaatactttctgttgttaatgctggttttatgaacatgggaaacataaacttgatatcctttaaagcggccttaaagcactttaatgtaagatattcaaatgaattttttataagtacaagttcaaatacaagtagtataaagaaagatcttataaaaaaattcaagggctttcctgtatctgtctccacaaaacaagataatgtaaataaagatgcagcttcttcaaaagaatttataagtctctttaatatcttttcatttacttctatgttaattgctttattaggcatactaagcaatatatcaataagttttgtgcaaaggaaaaaggaaatagcctccttaatatcaataggccttagttccactggtaaaaatctcatgatattatttgaaagctttacagaaggccttatagctttttttataactttcctatcttcaatatggacactaactttacttagcgatatattcaagtacctagtactaaatataaatatcacctacccttttagttttatgccttgggcagctttatctgtatctattattatgtttatagcttctcttaaaactttattgagaagtaaaaaattgaatcttgtacatgaattaaaatatgaataatttgaggtgactgtaatgaaaaatttaattgaagttaaaagtatgtataaatcctttaatataagtaatgacaaagtagatgttttaaaaaatataaatttaaatattgaagaaggagcttttgtttctgtaatgggtccttcaggctgcggaaaatctaccctattatatattttgggtgggcttgacagtgctacttccgggagtgtatttatcttaggaagagaatattctaaaatgaaagaaaaagaaaagagtgcactaagaagacaacgacttggcttcgtatttcaattttataatcttattccaaatttgaatgtagaggataacatacttcttcctctacttttggatgggaagaatccaaacaaatacaaaaaaaaattagatgaactacttgaaataataggtatgacaactaaaagaaaattcactccaagggaactttctggtggacaacaacaaagagtttctattgcaagagctcttatatttgatcctgatataatacttgctgacgagcctatagggaatttagattcaaaatcaggaatgcaaataatgaaactttttaatgacataaataaagacttaagaaaaacaatagtgcaggttactcattcccttgaatcatcacattatggaaataaaattgtaaacttaaaggatggtaagattatatagataactatagagttgtatcttttatattaacaattagaaatactttaaatataatattactataaagtaataattatgaggtttatgtcaatggatgatttagatatttttcaatttaatgaacaatactttagaccttctaaattaactgccataaatataaaagattttgattacactttttttgataaatattggaacgaagattataataaaataaatttaccaagctctttttttacctctccagagaataccttaataaattactttagtattctaagagaagcttctatgatatctaaaggcggctgtggaagcataggaaacagcctagctccatatcccatatcctacaactttcttacagaggattttaaaaaaagagttaattataaaagttatatacgctattttaatgatattggtcatataaatcttataaagcttaataaactttacaacactaactcttctagcaactatagatacttttttgaagtagagacaatagaaccttcagtaaatggaaatacaagctttgcttactactacggtttcatagatttgactttagacggtgaaaattacaaaatttcagatatagatatacgaggagaagacttcttatgtgcaccttatcacggttggtctcataatgctgaactctatgtggatacaacctatggttcttggtgccatctaataaaagaaagacattcaacagaaaaagatggttatacaaaaaacatttacgtaaccggcacggatggaaaagagtataaatttcaatttgttcaattgactaacggcacagatgtacaagttaatcaatttgttaagaattcatctgggaattttgtacctactataatcgacgtaaataaatgtttaccaagatttaaaaggtttacacggtatataaaatgtccttttaaatttagataactactatatatgaaaaataataacaataaagtatccagaaaaaaattttttctgtatacttttatgtatagataatctatttttccacagaataatagcatcttttaggtgatactaccttaccttctgcctttaatgcttttatagccttgtcaacttccttagaatctacttctgctctttctgcaacttctttagttttaagtggttcaattgaatctgataatatttttaaaatagtttcttttatatccatatataaacttcccctccttgatagtaattatctattaatatttactatctaataatatactacattatctaaaggttgtaaatacaaaatttacgctctataataatatttatagtgtaaatttccttatttctataaattaacacaaatttataacgactttattactatacagtttattacttgaaaggcggtaatcacaatgaaaaaatataacatacccttctcaccaccagatcttactgaaaaagaaattgaaaatgttattgaagttttaaaatctggatggattacctcaggacctaaggtttttgaatttgaaaaaaaggtagcagaatattgcgaatgtgaaaaagcagttgctgtttcaagtgcgacctcagcgcttgatttaataatgaaagttttaaatttcgctcctcctgatgaaataataacaacaacttatacctacgcatctacttcaaacaccatatgtcatagaggaataaaaccaatatttgtagatcttgaaaaagattcttttttaatagatataaataaaataaaggatgctataaccgaaaaaacaaaagcaatagtaactgttgatattgcaggaataccactagattacgatgctattagaaatcttttaaaagaaatacatagagaagatatcatacttatatccgattcttcacatgccttcggagctacctacaaaggaagaaaagttggatgccaggctgattttcatgtgttttcatttcacgcagtgaaaaatcttactacagctgaaggtggagctataacctttaacaataaccactttaatggtaaagaagatttatataaagaattcaaatacacagctttaaatggtcaaaccaaagatgccctcacaaaatcaaaagctggtggctggcagtatgatattttaactgatggcctaaaatgtaatatgacagatatccatgcagccattggtctagttcagcttacacgttatgaggatatgttaaagaaaagagcataccttacagaaatctacactgctgcattgaaggataaatcttgggctattataccttttactaaagatactgaaaaagaaacctcctatcacttatatccattaagaataaaagattttactgaattgcagcgtaatgaagtaataaatatacttgcagaaattggtatacctacaaatgtacactttactcctctaccaatgttcacttattacaagactcttggatattctataaaagattatcctaatgcctataatcaatatgcaaacgaactaactcttccactatattcatctctttcagtagatgatgcaaaatgtatagttaatgaagttattaatgcaattgagaaagttaagtcaaaataaaaataaggaagctttagcttccttatttttattcaataacatctttatcaaattttgatttatatattcttcttctatcaagagaccatattgcatcagacatctctcctggagcagttgtttcaagagcctttttcatatcaaacatggctgcatccatatcatctaaatgatgcaatacctctgcttctggaaacattggttttttagggctgccatattcagcttcataatggtgtgataataccatatgctcaagcatcatagatatttctttatctgccccaacctttttagctgaatttcttaccttctcaacacccaatattatatgtcctaaaagctgaccctccacactgtaatcagtaactattccaagttctgaggataccatttcttctagctttgccatatcatgaagtattacccctgcatatattaaatctgtatttaaaaatgtgtatatctcacttattttttctcctaccttcagcatagtaaaggtgtgatataacagtcctgaacgaacagaatgatgatttttcttagctgcaggccaatacattatttcctctcctgcgctttccaaaacatcatataaaatattttttatatccgcattttttatcttctctacatactctagtatagttgaatacatatcatctggaagatatggagcagacggaacgaagtcagctactttaacattatctgaatctactgtctttcgtattttgtctatttttaattgaaggttattttgccactcaattactgttccacgtacctttacaagcatgttatcaacaaacgcatcctcatcttcatctgatgcatcccaaagttttccatttatgtctccagttttatcaccaaaagtaaaatcaagatacttcttattgttagaagaaattcttttttctgctgatttaattataaagaagccatctattctatttcctgcttccaattcactaatagtctttaattccaaaaatattcctccatttctatataaccatataaaaaacatccttactctattttaatagtatctcctgtataaaacaaataaagatatttttcttttacctttaatcctgttacaatttcaagagctcttttataataattaatttgataagtatattttttaactgtttcatttaaattttcatcatttatatagtcatttttataatctaaaagcactatttcatcattttccttaaaaaacaaatctacaattccctgcacaattatattttcatcatcatatattttaggtaaatcattatatatttctgtactcttaacacgtatttgaaaaggaaattctctataaactttttcagccttaataactctactgcctattggactttgaaaaaatttcaagattctatttatatttacactttcagcttgcttctctgttaaaatccttctaaaaaccatatcgtctatttgatgtcttatattttttatactcatgtcacaacttatactactaaaatctaagtgctgcattactgaatgtactgcagttcccctttctgatggagacatctttttaacttcctcaagaaaaagaggcttttttacaagagaaggcgtaaaaatcttagtagcatactcatcattatcttcatttatatttcttttaagttctgttactgaaagcagtgatggcagttctgcagctttttcataacgatacttaaattcaagcctactttttatttcttctatataaacactttcatagtttgaacttcttatttcttttagtcttttataaaattgcgttagtttttcattaatgtttttttcttcttctaataataactgattaaaacttaaaacatcatttctacttaaaacatttactcgccaactagaaggatcacaaactaaattgtctatattttctttagaagtgtccataatatctcttagattttctgcatccttatgtcttataacagcactagctatccaatctaaaaagcttttacttttaagtacataatcctccgaaattttattttgattacttctaagattcacagcccatttaaaaaccgacctctttatgtcgctaacagagcctaccattataagtttctcttttgcccttgtaaaagcaacatacaatattctcatttcttccgaaagtgtttcaattcttattctgttttttattgcctcctttgcaagtgttttgtgcgaaattctttttttataatctacatattctggtccaaacccgagataattgtgaaaaagaactggattattcatatccatgagattaaagtttttccctaatcctcctacaaaaactataggaaattcaagtcccttacttttgtgtatactcattattctaactacattttcattctcgcctaaaatttttgcacttcccatatcaccactagtaagcttaagcttatttataaaatttataaaattaaacaatcccttgtagctagtttcactataaatcttagccctttgaaataacattttcaaatttgcttgacgctgaattccgccgctaacagccccaacatagccataatatcctgtatccgtataaagataccatataaattcatctataggcgtatataaagattcttttctccacctataaagtctattaagaaatgtccttatccttactgaaaactcatcatctccaatatctgctgccactttaagcttatcataaaaggtgtctccttcaataacttttatatctattaaatcctctactgaaaatccccctacaggtgattttaaaactgctgccataggtatatcctgtcttggattgtcaattacttgaagcagtgataacatagttttaacctctggagcatcaaaatatcctgaattggcatctgcaaaaaccggtatccccatgtttttaagctcatcagaaaaaacatttgcccatccctttgtggatcttaataatattacaatgtccttaaactctgcttttctataaacgtttgtatttttatcaagtaccttgaaattctccttaagctctataattcttctgccaataagtcttgcctcaagcataatgttatctacgctttcctcatcctcattgttctcttttatttcagtgttatcttcacttttttctattatgtttagctctgcagagtgagaaattaaattttcctctatttcttcataatttgcacctaaattcaatttctcgttatcgtcataatcaagttctccaatattaacagacattatttgcttaaaaacaaagtttactgagtccaaaacttcttttctacttctaaaattcttatataaaagtacttttctattcttctcatctttattttccttatagctattgtacttttctaggaaaatacctggattagcctgcctaaacctatatatactttgctttacgtctccaaccataaataaattgggattttccgtatcctttctagaaatagtacttaatataacctcctgaaccatattgctgtcctgatattcgtctattaatatttcctcatatttttctcttattttcaatgcagtttcagaaggtacaatattaccactttcatcactttttgtgagtattgaaagacacatatgttcaaaatcattaaaatcaattatacctctttttttctttttatctttatatctaatatcaaattctattacaagttcacttaaagttttcataagaggataaagaactttaaattcctcttttatctcctcactattttgtgaaagtatatcttcacttattttagataaactttttttaacaccatctcttaggtcacgtacaagcttctgcttttccttatcagcatccttagggcatctttttaaagtcttaaattgaacatttttaagttcctcatataacttttcgtaattattagaagctacaatcaatttttcaagcattgaaagctctacttctaagttttctctataactttcaatggatgcacatgaatttattatgtttattgactctataagctgccctttcattccaagtaactgtatttgtatgtttttcattaaaacctctgcccaaagggaatctccaaactcaaagtcatcatctacattaaatctttctgctgctttttttagccatttatacggctcaggattactcattgaaaaattataaagattcattaccatattaaaaagaacttgatcatttttattgccacaataactttctacaagttttaaaaattctatactgttattatttttatttattcccttagatgtatattccgcctgaaggtacttatcctcaaaaagctcctctaaagtctcgttcttaagaagaataatttccgtttcatctccaactctaaaatccggatctaaatcaagcatgtgaaagttattttttataacatctaagcaaaatgaatgtattgtagtaattttagattttccaattaaggcgagctgtttttgaataaccctagagtttgggttttcacaaagcttatttactattgcatcccctattctctccctcatctcagatgctgctgcattagtaaatgtaactactaaaagcctatctatatcaactggattttcctcatttgttattatttttactatcctctcaacaagaacagcagtttttcctgacccagctgcagctgctacaagaagattacagtttctagtatctatagcttccttttgctcttctgtccaattagtcttccccacgttcatcaccctcttcactcatttctctttctataagcttccaaacctcttcatctgatttttcctttacatatctataattattgccatcaaacattgtatcaaatctacaaattgaagaatacatgcaataatcacaaggtttttcttttccttttttatatggctttattcttatatcacccataagcaggttttcacaatttttaacaactaaatttctcacatgctctattaatatgtcaaactgttctttagtagcagcacttgaccttccaagtgttccatccttttttattgatgcaggtattataatagaacttccttccatttctctatccatttcttttataacatctggatcagaaagcaaaagccctttcatcttaagggatttcattatttcttctcttatttgttcatctgttaaattattttttcccttaataatagggtcatccattgtaaaatataatattgcacctggcagaaccttatcttcttcatccaaattttcattttcgagtatggcattgagatacaataaaagttgaatatcaaaaccatagtaaacatctgaaagtttaaatatcttatttccagatttataatctactattctaatataggtacttccgtccttttccatcatatctattctatcaattctacctgtgagtacaacttcacttccgtcattaagtccaacagttattgggggataactcccaccattttcaaaagagacttcatatcctactggcttaaaacttcctcttttgaactgctctgctacaattcttacagttctctttaaaattcttttaagccttaaagctatataactatatctaggagaactatttagtattgatcctcctctaccctctatttcctggtccactatcttatatattttttcttcacatatatgatcattaacttcattccaatctatattctcttcttttatagtttcacaaaatctatctatcaccttatgcataaatgaacctaaatcaggaggtgttaagctgaatatttttctatcctttatattaagaccatattgcacataatatgaaaatggacattcaatatatttttcaagtcttgaaacactcatcttaagacttccaccataaagctttaacgctttttcttcacttatataatctacttgatttgtatacgatatggctttaaacatattattacattttccagtccattcatcgcttttgctataccatctatatacatcatgccatatgctgctaacctcaccttctccatctatttcttttctaaaagatgatatcatctcattaaaggtgggtactgttgcagaaataagcttcatactttcttcatcgttttctattttaataacatcacttttttctactatcttaggaaataatgtcttaaccctattcactataagagaaggtcttaaagtctttccttcatagtctgctattggatagctcaaaaatagatattctttagaattggtgatagctgtataaactaagaatctttgttccatagcttgagtttttgtatctttagctagctccactccttttgaattcaaaatttctctatctctatcacttaatattccttcttccatggctgcagatggaaatacgccgtcattaactcctattatataaagaatttttatagcatgactttttaaacgatctatacttcctactaatacttgatcaagtgatgatggtatgagtcccatcttatgttcttttattcctataaataatattcttgaaaactgctctaggtttaccttctcatttcccattacttcaactaattgatccattaattctattattatattccatatttgactgtattcattagccaaaatttgccttccgctttctctaaattcatttaccatcttctcaactgcctcaggaacatttatatcatataaaaattcaaataaagctctgcatatttcagctacattatttcttcttaatactctttctctgaaattaagaataggtcttaaaaatctattcttaatttcatttaccttagatagcttttctttactttcttcagaaatatcaccttccagcgcatcaccatatacattatatgtccattcttcttcagtccattttttctttccttttataccagctgctagaacataattttctagtatatctatttcgtccggttctatgtctgcaaatccagttttaagatatctaaataccgtttcataagaccaatttttaacaaaaatatctataatggattttattaagattataagtgtattatcctcaatatctttattcctgtctataaaaaacggtattctatattccttaaaaatcaccgatacagttttttcatagcttcctaaatctcctgttacaacagctatatctgaaaatcttacattatcttcacgtacaaattcaattatatttcttgctatcttctcaacttcagtatataaatttgaagtcttgaaaatttctattttatcaggtccttttttataaatttcatatggaaaactatatagattcttttctaaaaagctcaattcaggactatttttaaatctatagaatggccttccattcaaattgataggtttctctatgcttatattattattctcagctaatttaagcagccttttttctgtattttgggttacagaaaaaatatcattgtcttttgaagcgttatcgtaatccatagttaacgtaatgtttactctagaacattttttcagcaactcctctattattccatactgctgaggaatgaagcttgaaaactcatctaaccatatctccgctccctgaagcactgtagactgctttattttatctttaagtattgttaaatcatcatcagggtctatataattcttataaagcagtctattaaattcatcatatatcaaacttaaatcatgcaatttgttcttaagctcttcatcttctatttcatctatagtatctctaagtacttctgttgtaagttcgtattttttaaactcacttacggtgtcagctatggtgtttacaaaacctttctgcctagctgaaagagcaaaaaccctaaattcactctttaaagtattcattatatgataaaaaagcatacttttgccagaggaattcatgtgttctcttgctattcctccaacctcatcaaatattctatatgccaatcttttaaagcttattacctttaccctattaatactcttttcaccaattaagtccaaaatatttttttcactctgaaatgaaaattgttctggtacaattaatataaggggcttatctccgcctttttctattctagtatttatactttctatacaaaattgactttttccacttcctgctcttccatatataaacctcaaactcacacttatccacccctttttccatcattctataaaatatagcaacctatatccttaaaataattgttttcatcataaattatatacaataaaaatatacattgcaaagtttgcaatgtatatttttattattataaagctataaaacatttccagagttgagcttatatatatagcatctctattacttatatataggaaatccactacataattctgaaacttgtttccttatttcacttaaatcttcatctctatgctctataacatagtttatgaaatacgctacttttttcatttcctcttccttaaatcctctagttgtaactgaaggtgtacccattcttattccacttgttataaaaggactctttttctcaaatggtatagtatttttgtttgcagttattccaactgaatcaagaagatgttctgcatcttttcctgttatatttttgttcgttaaatcaactaataaaaggtgattatcagttccacctgaaactattctaaaaccgtattttgtaagttcatctgcaaacacttttgcattatttactatttgctgtgcataatctttaaaatcatcctttaaagcttctccaaagcatactgcttttcctgcaattatgtgcattaaaggtcccccctgcattccagggaatacagatttatcaatgtcctttgcatacttttccttgcagaaaattgctccgcctcttggtccccttaaagtcttatgagtagttgttgttacaaaatcagcatatggaattggtgacggatgaagtcctgctgctacaagtcctgctatatgagccatatctaccatcatatatgctcctacttcatcgcatatttctcttattttcttaaaatcaataattcttgaatatgcactagcaccagatactatcatctttggcttacactccaaggctttttttctaaacgcttcataatctatttgttctgtttcatcacttacaccataggcaattatattaaagagttttcctgaaaaattaactggacttccatgagttaaatgacctccatctgttaggttcattcccattatagtgtctcccggcttcaatactgcaaagtaaacagccatattagcttgtgaacctgaatgtggctgtacattagcatgctctgctttaaaaagtttttttgccctttcacgtgcaagctcttcaactttatcaactacgtaacatccaccataatatctttttcctggatatccttctgcatacttattagttaaatatgaacccatagcttccattacagctttgcttgtgaagttttcagatgcaataagttctatattattttcttgtctcgcattttcttcttctatgatagaatagacttcagaatcacttacttttatattttcaaaatccatatataatacactccctcatacattaatttgctaagttaaaaaattatcaattttatgtatgattatataccaaaatagcgtagaattcaaataaaagtttgtgttataataatttctggtcagtatatatgacgaattttaattaaactatactatatcttttgaaaggttttgttaccctatgtctacagaaaaaattataaatttagctgcttatgcaggaaagattttacttcaaagtggagctgaaatatacagagtagaagaaactatgaataaaatttgtacagcctttaatgttaaggaggcagaaagctttgttacccctacaggaataattatttctattacaggagaagatgaaaaaataacctcaactataaaaaggatacaggttagaactgttgaccttagaaaaatatcggaagtaaatgatctttctagaacacttcaatacaaaaatttttctttagaagaagttgcagacaaacttaaaaaaattgacaacgaaaaaaaacattcggacttatttcttatattttttagtgccgtagctgctggtttttttaccttaatatttggtggaacctttagggatttctctgtttcattttttataggaataattattaaaatattttcaataattatttctagacttgaaataaatgactttttcttgaatatggtaggtggggcaatagcagcttttatagctctattgtttaaaaaacttggagttgttgtataccttgataaaacaataataggttctataatgcttttggttccaggtcttgctattaccaatgctgtaagagatacaatcgcaggtgacttagtatctggtgtctctagggccttagatgctttttttacagcagtagctatagctgcaggtactggtttagtatttaagatatggattaacttttttggaggtactggtttatgatcttaaattttttgtactcatttatggcttgcatagccttttcgttcttattcaatgttaagggcaaaaaaatacttattgcatcttttggtggagcacttggatgggttatatacatgttttgccttgatattaaggtttcagtaacctcttcaatttttatagcttcaattatagtttctatttactctgaaataatggcaaggatttcaaaaacacctgctattgtctattcagtaacaggaataataccactagttcctggaaacggtatgtattatactatgtatgaaaccatatcaggaaaacttacaaaggcaggcgaatggggatttaaaacccttatgtatgctggagctatatccattgctattatgctggtttcttcaattgctagactcttaaagagcggtacaaataactatgtaaaggctattataaataaaaaaatgtaatatgtagtgtttagttgatatttaataaagaggtttggatttattccaagtctctttatatttgtgtattggcttttttctagtttagttccttttttaactcctgaatataatgggctcgcgcccaaacccccatctcgcaattcccactgctttaggtattagcttttttctagctcagttcctttttgagctcctgaatataatgggctcgcgcccaaacccccatctcgcaattcccactgctttaggtattagcttttttctagctcagttcctttttgagctcctgaatataatgggctcgcgcccaaacccccatctcgcaattcccactgctttaggtattagcttttttctagctcagttcctttttgagctcctgaatataatgggctcgcgcccaaacccccatatgtttactttacgaacatggttatggctgaaattatgtcatcaatatttgaatcatttaattccttctcacccatttctttaagttcatccttcatgcattttttagcataatcttgaagcataagtattcctattttattaacagcagctttgactgcagcaatctgaaccagaacatttttacagcatgtatcagactctatcattttttctattccctttacctgaccttctatttttctaagcctgattatcaagtcctttttatttttatcactagtttcgcccactgacttcactctccaataatataaggaaaaatcaatttcctttataaaatcatatagggtttaatatagagaagtttaaatttaaaatattataaattcaacttaactatagaaaccctataatttaacataatcaaaatactgcaaaacttaaacttcttttcaatccctaagtttgcacagctttactattaatgtttcctaaaaaaacaattatttattcttcttctttactttcaacttttattccaagctcctcaatctgattttcatctacaacattaggagcctctgtaagaggacagaatgcattttgatttttagggaaggctattacgtccttgatgttttcagtacctgcaaggaacattataagtctatctaatccataagcaagaccagcatgtggtggtggcccaaacttaaatgcttctagtagaaaactaaatctttcccaggctgattcctttgtaaaaccaagaaccttgaacattctttcttgaagtgcagtatcatgaattctaacacttcctcctccaagctcttctccatttaaaactatatcatatgccttagcccttactcttcccggatcagattcaagatattctatatcttcatccataggcattgtaaatggatgatgttcagcttgaaatctttcttcttcctcattgtatgataatagtgggaattcggtaatccaaacaaatctaaattctttattatcctttaaaatttcgagttcctttgcaatctctaatctaagtgctcctaatgactggaatacaacagaatttttatctgctactataagtataagatctcctgttttcccttgaactttgtcgattattgcctttaattcttcctcttttaaaaactttgcaataggtgattttattccatcttcttttaatgctatccatgctaaaccttttgctttgtaagtttttacaaactcccctaacttatctatcttctttctaggcatatctgcagaatttggtgctttaattgctctaacacttccgccttcttctatggctgacttaaatactttaaaatctgaagtacttacagcctcacttatatcattgatttccataccaaatcttaaatccggtttatccgaaccgtacttttccatagcagttttccaagtcattctctctattggaagtttaacctctactcccgccatttccttaaataccttctgtataagtctttcatttaattctattacatcatcttcttctacaaatgacatttccatatctacttgtgtaaactctggctgcctattagcccttaaatcctcgtctctaaagcactttgctatttgaaaatatttatcgtatccagaaaccattaaaagctgcttaaataactgtggtgactgtggaagtgcataaaattttccattataatttctgcttggaaccaaatagtcccttgcaccttctggtgtactcttagtaagtataggtgtctccatttcaaggaagttctcttcatccatgaaatcccttattatttttgtagtcttatgtcttatcttaaaaattttctgcatatctggtcttctaagatcaagatatctatatctgagtcttatattttcagcagcatcaagattttcttttatgtaaataggtggtgtctcactttctgacaatatttttatttcttcgccctttagttccaccattcctgttggcatatttgggtttggcgattctctcttgactaaagttccagaaactgaaatacaatattctgatttaactaaatccgctttcataaaagcatccttatttatttcttctccaaaaactacttgaagtataccttctctatctcttaaatctacgaatactaaccctccaagatttctttttctctggacccatcccatcactacaactctatttccaatatggttctctcttatttctccacacataatggttcgcttcaatccatttaaagattctcccatttttattcctcctaaaatacgtaatacctatgtcataaataaaccacttcatatagtccattgaagtggtctcaaatttaattttaaacctataatatacttttatcaaggtttattatccatataatgtttttaaaaaatatattttgccatttaccttttcttcaatcctatttatgtactcttttacatcctttaaatttggatatctttctattctgttagtctctttaaatagtatctttgaaaccccatggcacccaattgcaattattggttggctatcctctatcatttgtatattgtatatgcattctttaccctctagagagtatcctacattctccatatttcctaccatgttcttctgtctatacatgtaatagggcttcatattaagctctcttgcacagctgtatgccttttcaaacatattcactatatcatcttgatttggtgcttctatccttttatcctctagcatatcctcaaataacttggatcctctttttaaagatagtccatgtattgttaaactttcaggtttaagcttcaatatttctatgcaagtattattaatcttatccaaattctctccaggaagtcctattataatgtccatgtttatattgtcaaagcctatttctcttgccatattgaatgcgtcaattacgtcttttgatgtatgtcctcgtcccattgacttaatggtctcgtcattcatagtttgaggatttatacttattctatgaactttatactttttcattgtcaatagttttttccgtgttatgctatctggtcttccacactccacagtaaattccttaacattattaccctctataaagctttcatatactgatttcattatagtttcaaattgttcatcgctcacagaagttggagtaccaccaccaaaatatacacatcctatttttagtcccctttgccttatataacttgatgttttttctatatcgtacatcatagcctttaagtaatcatccacataacttttacagtgactaatggtatctgatataaatgaacaatatctgcaccttgtaggacaaaatggcatgcctagataaatgctcacactattgtctacagatttcaaaaacttcttttcatttttactaacttctatacaaagcttagccttcttttcatcagtactattatgaaccttgaagtattcaattatttctttatcacttttattttcttccaaaagcttacttgctattttacttggtcttatacctatgagtgttccccatggtatatttcttttacctgtaagtccagagaaatatttgaatacagccatttttacattctcattaatattaagcctcaaatcaaatttataattttcaggctcactttcttttgagcaaatttccatactctcattattaaatactatgctataatcccataatgtagattttacaattttaacttcatcgaagaacaaaattgccatatgataaacagcatacgaatgcgcttcatcacttatcttaattttagtcataaaatctcctctagtttgatttaaatgaaaggattatgaattttttcatatcctatagtagttccttcaccatgtcccggatatacaacaatgttttcatcgagtttcataagtttactttttattgaatttataagagtagaaaaatcccctcctggaaagtctgttctgcctatagaactgttaaaaagcgtatctccagaaaacaagtaattatccactaaatagcacattccacccggagtatgaccaggtgttttgatgcattttatttttaattctccaaattgaagttcatcaccatcatccacatacttcgtagcattttcgcttttatcaccaaacatatattctccattttctattaacttgcaatcatctttattcatgtagacatccacattatattccttttttaactctgccacagcagctgtatggtctgcatgtccatgagttaatagcacaaatttaaggttcgtctctgtatccttaaaagcttctaaaatagcctgtggtgcatcccctgggtctataactacactttcgttggatttttcatcaacgagtatatagcaatttgtcatatatgctccagcctgaattacactaattttcataatatcacctctaaaatacttttttactatcaataagaagagttacaggaccatcattttgtatatctacatccatatgtgccccaaatactccagtctgaacatttggaacttcttttctacacaaatcaacaaaatcgttgtatattttttcagacttatctccagaaagagcctctataaaactcggtcttctccctcttctacaatctccatataatgtgaattgtgaaattacaagaagttctccattaacatcctttaaggatttatttaattttccctcttcatcttcaaatatccttaaatttagtattttattctttaaatactctatgtcctctagagtatctccttctgttattccaataagtgcatttataccttttcctatttgcccaactactttaccgtcaacctttactgaagatttctttactttttgaacgactgctctcataaaatcccccctagctattagttctatatatatcaataatgcctggaagccttctaagctttttcataagcagcgctaaatgctcaacatcctgtatctttaacttcaaattgagatatgctgatccctttgaagtttttgcattaaccgattctattgctatttccatgtaacttataacttctaccacatccgcaagaagagcttgcctatcttccgctttaatttcaacttcagccatataactttcgtttttactttttccccattttacttctatgattcttgaactatcctctttgattaaattatttacatttgtgcaatcagtcctatgaactgaaactcctctgccttttgtaatataacctattataggatcaccaggaactggtgtacagcatttcgcaaatcttactaggacatcagaaacgcccttaaccgttactccaggctgctcactcttagaaatctttttagaggagtgttctttatgaatgttcttatttacattttcaagtacttcttcatttgtaagagaaccattatccttattcttttcataaatatctttaaatctacttaatatcactgatgcccctactgcacctattccaacagaagcatataaatcgtctattgagttcatattatatcgttttaatactaactctaaattttcacccttagctatctctccaaaattaaattcctgctttttcgattctttttctaagagttctttgcccttgcttatgttttcatctcttttagcctttttaaaccaagaccttattttgcttttagcctgattgctagtaacagaattaagccaattaatattcggacctttaactaaagatgttgttagtatatcaactatttctcctgttttaagcttataatcaagtggaactattttaccattaacctttgcacccacacacctatttcctatatctgtatgtattttataagcaaagtctactggtgttgcattatacggcaaatttattaccttacctttaggtgtaaaaacaaaaatttcatctgaaaataaatctatcttaaagttttccatgaactcttgagcacttggcgtttctctttgccattcaagcatctctcttatccatgtaagcttagtatcatctttatttgcattcttattttgaggaacattttgagtactttctattgttccttccttatatttccaatgagcagctattccatattcagctgtcttatgcatgtcataagttctaatctgaatctcaaaaggctttccctcaggtcctattaccgtagaatgaagtgattgatacatattaggttttggcatagctatataatctttaaatctgcctggtataggtttatacattgtatgcactattccaagggcagcataacactcttttatgttatttactagtattctaacagctgttaaatcaaaaatctgatctaagcttttactcttatttaacatctttctatatatactataaaaatgttttggccttccatcaatatctggagttatccctgatgcttccaaattaagtttaagttcttctactatcttgcttatgtattcttctctttcaactcttttttcagctattagatccacaagctcatagtattcctttggtttcaaatatctgaaggacaaatcttcaagttcccattttatcttagacataccaagtctatgtgcaagtggagcatatatatccagagtctcctttgccttctctttttgtttttgctcacgtttaaatttaagagtacgcatattatgaagtctatctgcaagttttattaaaataactcttatatccttagccattgcaagaagcatctttcttacattatcagcttgctgctcttccttcgtcttataagttattttatctagctttgttacccctgatactaaatcagcaacttctttgctaaacatttctgtaatatcatcatagctataacttgtgtcctctataacatcatggagtattcctgcaactatagtactcatatccatacccatctctgctaaaatacacgctacatcgagaggatgacttatgtaaggttctccggactccctcatttgatgtttatgagcctcatatgcaaaattgtaagctttaatgacaatatctttatctacattattacaattttcatctatcttttctaataaatctgataattcagccattatggtactctcctaaaatcaaaggctggtcacataaccagccaaatttattattatttattatatagtatacattttaattttataattgtaaagagattagacttttgtttactttttacaataatttttatctatacattgtacttaactaatgacattgtatcataatctccaagcttatcttttccattcaaatctgtaagctctacaacaaaacatgccgctacaacctctccaccaagagcttctacaagttttgcaactgagttaatcgtaccacctgttgcaagaagatcatcaactattgcaactctttggccctttttaattgcatccttgtgcatttccaaaatatcttctccatactcaagctcgtatgtaacctcaactgtctcacatggaagcttacctttttttctaactggtataaaacccgctcctattttgtaagctacaggagctccgaataaaaatcctcttgcttcgggtgcaactattaaatctacgttcttatccttaagatactctccaatcttatctacggaatatttatatgcttctttatcttgaataagggtagtaacatccttgaagcttattccttcttttggaaacccatctataactcttatactatcttttaaatccatttaaatttccccctaaaatatatttagaaaatactaacttaacttatatgtaatattgaaaaccctataaaataattatatatcaattattttacattttacaatacactaaaaaaaatcacctttatatctaaactcattatttagatacttggctatttgctctgctttataactgtcctctgttgtaaaaagttgaactattattctcgcattatccatcttacccacggcatttacagtaggtacaacagcttcagataacttccttacctcatctatatcaactttctcgacagattttaattttagcaaagcttctattccataattattggtattttgtatttttcttataccctgatcaactataattttattttctcctgataactcttcacatttatgtatagtaccaattgctgcaagatctaaatatttattaacgcatttcatttgataatacattgaaatagcttcacatagtttaaatactattccagaaacacaaaattcgttaaacggatacttagattccttcctattaggatttactactattgcataatcctcttcattgcacatttcatgataatcaactactattgtatctattttaagcttttttaataatgcggtactttcttttgaattaattccacatcctattgttataagcaaatttgctccaaagtattttattttatcatttacataatcagcatttacttcatagctaccacaaaaatcatcgggtataaggtattctacatcagcattaaggtatttcaaaaccaataacattatggacatacctattatactgtccacatcgcaataaccatataacactattttctctctattgtttatagcctttgctattctctgtagtgcttcattcattccttcaattaagaatggattatgcattccctttaatccgaaatattgtaacttatctcccgttctttccatctttattcctccgaatttgtagaaaacaaatatattataatgtattatgagatattttacaaatacttttttagctaaaaaaataaaacagcccataggctgttttatttttgagcttctgctttaatttggagcttttttttgttagctctttccttaaatataacccataatggactagctataaatattgaagaatagcatccagaaactataccaacaagtaaaggctttgtaaaatctcttacagatggaacgaatacatgtactgaagagactgctattaaaacagttagaaccgtataaattgatcttgtcaaagtttcatttatactaaaatcagcaatttcagatgtactcattcttctatgcttcctgctattttctcttattctatcaaaaacaactatagtatcactcatagaatatcctactattgttagcattccagctataaatggtgaatttaatggtattgcaaaaatcccatataccgcaagtgttacaagtacatcatgaactaacgatatcatagctgctacaccaaatttaaattcaaatctccaagctatgtacaaaagtataattaccagtgcaattgcaagtgcaatcaacgcttttgttttaagttcctgtcctatagttcctcctatcttctcttgagaaaccaaggcctttgattttaaattatattttttttgcatatccttaaatattttgttaccaatagcatctgtcatggtactactttttatttcaacctcagtattattaaccgtggttatagtactatcttttatatatttatctactatcttttcaacatcagttttgttaaaggacttccctatctttatatccattgagtttcctccaacaaaatctataccaaattccaaaggttttcctgtagtaactcctctatatatcatgaatgcaattcctaaaaatattatagtaagagatataccaaaccaaactttagtatgtttaataaccttaagcattacttaccactcccttccagattaactccgaaatgagatgctttatttataagtcccatgtctatagcccacatcaaaagtcttctagttacaataatagcagtaaccatacttataagaacaccaattaccagtgttaacgcaaatccttttacctcgccacttccaagagcataaagtataacacctgaaataatagtggtaacatttgaatctattattgatgacatagccctatgaaaacctgcatcaaaagctgatctaactgttttaccaattttaagttcttctttaaatctttcaaatataagaacattggcatctacagccatacctatcgtaagtaaaagtccagctatacctgaaagtgttaatgtaacttttacagctacaaatgcacctaaaaccaaaacagtaaataaaactagtgctatatctgccataagaccaggtattctatatactaaaatcatgaataagaatattatacatatagcaactgctcctgcaagtatactgtttggaagtgcacttgcaccaagtgaggcacctacagttttggattgaacaacttttagtgttacaggaagagctcctgagtttattatattagctatacgctgtgcttcttgaatagatttattaccagttatctgtgcatttccacctgttattactgaatcaacagttggatcacttaaaagatcagtatccatatatatagatatcttttgtcctaagaacttttgtgttgcatcagcaaatttctttgttcctgaactatttaattgaagtgatataataggctgattagtatttggatcagtacctgctgttgccttttttacatcgcttccagttaaaactgttttcttatcaggacctacgaacttaagtttaccagttttacctattttatttataacttcgtctttattgtacattccagggacatcaatttcaattttattgtttcccactcttgatacagttgtttcactaactcctaacttattaactcttaaatttagaagttctatagtcctacccattgcatcactatttaccttaccttgtatttcttctactacagaaacaccaccttgaagatcaagacctttatctattgattctgtaaaggatttaattctgtaatcccccacattaagtccagtactgcctaaataggctaatcctgctattataagaacgcttataataaagaagatggtgcttctacccttctttttcatttttatcccccttcatcaccaaattatgccatataatttatattgtaaaacttattctttaattttgcaataacaattttctcttattttaaaagttttatgccaaaaaagcccaaacgtaaaccatatggtttaatttagcgtctatttttttagtaaatattagttctttcttcctctaagcatattttactatacttttttattataaatacgggatttaaatctcgtcaacaaaatctaatattttaaatttaatctaccatctgtgcttttaatgcaatagcacactctattctctttttttgcattttacatcctatttcatacggaatatgcatatctccattaaaattataattattagcctgacatccaccactgcagtaaaatctagcccaacattctctacatttaggcttattgtatatatgtgcctctctaaattcattacccatttctttattaatattgtcatcatcatatatagttcccattttgaaatcttcgtttccaacaaattgatgacatgggtatacatcacctgatggcgttatagatacatattcatgtcctgcaccacatcccgaaatccttttgtatacgcatggtccaccatttatatcaatattaaaatgatagaatttaatttcttttccttctttatgtctctttatcatatctttatacaatttgtcgtattgctcaaatatttgtggtatatcttcttcccttaatgaaagattatgatcatctggcaacactacaggttcaatggatatctctttaaagcccatatccgcaatatactttacgtcttcaaagaaatcagtattatttcttgtaaatgttcctcttacataatactgttttgatttgtctcttctagctaccattttctttatattcttaagtatagcatcatgtgatccagttccatctgctcgtactcttaccttatcattaacttcttttcttccatcaaagctaagaattatattgcccatatttttatctaaataatccattatttcatcatttaaaagtgttgcatttgtagtcattgtaaatcttatatttttattgtattttttttcttctttcttggcatattcaacaacctgctttattgtatcaaatgccataagaggttctcctccaaataaatccacttcaatgtttttacgaggtccactatgttttatgacgaaatcaattgactttttagcaacttcaggagacattatttctctgcagcctttatattctccctcatccgcaaaacaatacttgcactttaaattgcaatcatgtgctatatttaaacataaagcctttataaatgatggagatttagtactttctttagctatatcctcatataaatctttagaataaagaactccctcatcaataagttcctttatttcatcatatgcttctgaaatttcttcttccttgtatttattcttcaatctatctaatagttttttcttacttcttattttatcctcatcaattaaatcataaaccatctcatctacttcatgtattgaaccagaattaacgtctattatatatctttgatcatcttgaatgaacttatgcactaatgacaaaattttttcctccttaaaatcaacttctaatttttattattataacttcacaaaaagtttagggctgtcccaaaatattcaactaataaggaagggtttaaccttgctatcgttaaaactaaggattttcttcgtgaaaaattttttcataacttttcctctcaaaaatcttagtttttaacgagtaaagcaaagttaaacccctagtccccgttctcaccttaaaggtgactgttacctgattttttatattatttactttcgcaagctaaatttgcaactgtgcaagatgtcttacatgctgattggcatgaatttgcacattccttacatccaggttttttaagactttcttttatatttgatttattaatactttttatatgtttcattatgattcctcccatttaatacaagctacaataaattatagcataatttaaaaattaaataaagaatttaaatgttaattccaagcattcctgacaatataccaactacaattgccaaagtaactcttataaaatctctcaattgcatacctccacttgatccatctacaagagaaacaatataaaatatcaagatataaaacaatccaactaaaagtccattaagccagccctttttgccagattttcttgaggaatagatactgccatacattacacttaaaagagtagttactagtataaccatattagtaataccttctgaaaaactgattttagtagaaacaaaagaaaaaatcaaaataacaataagagtaacaaatattgcccttaaaactcctcctgctgccgaaacgtaaattttactacttttctccaaataaactcacccccatccacacaaaaaacaatttcatacaataaccgtacaattattatttatgtagacagaagtagttttattacactctacttttgattatctgcttttctcgtttcaactgttgctattgcttctttttttatttttattttaactttatcaggtcctgtttgaataatgacaaattgttcttgtatgttagttatctgtcccattattcccccagttgtaacaaccttatcatttactctcatctctgaaagcattttattaaacttcttctttttagctctatccggtatatacatagcaacataaaacattccaagtaaaaatacaacataaagtatcgttaaaactgtatttggcataataaagtatcactccctataatattgaatttttaagcttttccagcccatgcttttaatttctcatttttaaattcttcaaaacaatctgcatctattgcattacgtatatcttccataagtgtattatagaaataaagattatggagtacacataagcgcatagcaagcatctcttttgctttaaataaatgtcttatataagctctactatagtgcttacatgttggacattgacatccttcatctatcggagaagcatctaattcaaacttttcatttcttagatttatcttaccgtgtttagtaaatacatgtccatgccttccatttctagcaggtagaacacaatcaaaaaagtccactcctcttgaaactgcttcaagtatattacttggagtcccaactcccattaagtatataggcttatcttgtggcaaatgtggaacaactgcatctattatgcggtacatctcttcatgagtttctcctactgcaagcccacctattgcatagccatctaaatccattttagctatagtttttgcatgctctattcttatgtcatcataaactcctccctgatttataccaaaaagcatttgctttttatttattgtatcaggaagcgaatttaacctgtctaactcttccttacatcttacaagccatctagtagttctctcaacggatctttcaacatattctctcggagatgggttctcaacacattcatcaaaagccatagcaatagtagacgcaagattactttgtatcttcatactttcttctggtcccataaatatctttcttccatcaatatgcgaattgaaataaactccttcctctttgatttttcttatttctgccaaagaaaaaacttgaaatccaccagaatctgttaaaataggcctatcccaattcataaatttatgaagaccacctaatttttttactacgtcatcacctggacgaagacttagatgatatgtatttgaaagctcaacttgacaatttatttccttaagatccatggaggacactgcgccttttatagctgcaagcgtaccaacattcataaatacaggagtttctattgttccatgaacagtctcaaatcgtcctcttctgactttaccagttttctttaaaagtgtgtacaaatgtattcctcctcagtttattttataaacatagcatccccaaagctaaagaatctatatctattttctacagctattttatacgcattcagtatattatctcttgaagataatgcactgacaagcatcactaatgttgactttggaagatggaaatttgttataagcccatctactatcttgtatttatatccaggatatatgtatatatcagtccacccagactgttctctaacatttcctttttcatctgcaatagtctccaaggttctagttgaagttgttccaacagatataattcttccaccattttttctagtttcatttatagtatcagcactctcttttgaaagcatataatactccgaatgcatatggtgactttctatattttctacctttacaggcctaaatgtaccaagaccaacatgaagagttaaaaatacagtttttattcccttagctcttattttatctaatagctcatttgtaaaatgcaaccctgctgtaggtgctgctgcagatccattattttttgagtatacagtctgatactcttctttattttctaattcttctgttatatacggtgggagtggcatttgcccaagcttatcaagtatttcttcaaaaatcccttcatacttaaattccacaactctattgccgtcttctcctatactcttaattactgcctttaaaactccaccaccaaactcaaactcggctccaacttttgctcgcttacctggtttaacaagagtttcccacgtatctttatcaattctctttagaagtaaaaactccatctttccgcctgttcctaccttatttccaataagtcttgcaggcaaaactcttgtatcatttagtacaaggcaatctcctggatttaaataatctattacatctttaaaaattctatgctctacttctccactttttttatctactaccataagcctacactcatctcttttatcacaaggatgctgagctataagttcttctggtaagtaataatcaaaatcttctaactgcaaaatatccacattcctttcatttacctacttaaaatcttacttttcctttttaaaaaatgagcattgatcattatttacagtaccattttttttcatattaaatggcacttttaaatgttcatatgcttttttagttgccattctacctctaggggtcctcattataaatcccttttgaagaagataaggttcatatacatcttctatagtatctatctcttctccaacaaaataagacaaagtttcaatgcctacaggtcctccagcaaaattattaactattgcctgtattattttattatctatgctatcaaaaccttcatcatcaacttcaagtaaattaagggcctttttagcagaatcaagattaactatacctctcccctttacatctgcataatccctaacccgcttaagaagcctatttgcaattctaggagtacctcttgatctcattgcaatttcgagagctgcatcttcatcgatatcaatatcaagtatagatgatgatcttactattatttccttaagttcttcatcattataaaactccatagggcaaagaacaccaaatctatcccttaagggtgcagttaataatcctaccctagttgtagctcctataagagtaaatttaggcaaatcaagtcttatagattttgcggcagctcctttacctattattatatccaaagcatagtcttccattgcagggtataatatttcttcaacacttctgttaagcctatgtatttcatctataaatagtacatcatactcagaaagtcctgttaaaatagcggctaaatcccctgctctttcaatagctggtccagatgtaacttttaaatttccacccatttccttagctattatatttgcaagagtagtttttccaagacctggaggcccataaaaaagtacgtgatcaagagcctcacctctctttttagctgcccttataaatatatccattttttcttttactttactttgacctatatattcatttaacttttgaggccttaagttatattctgcagaatcttcttctaaatttactgatgttaaaattctatcatccatattaaatcactctcaattcattaaaaaccttaaacaactttttataatattttcaatgccttcactcttgtccacattatttatagccctatctgtttctttttctgagtatccaagcgaatttaatgcaaatcttacttcttctagcttcttactgtgttcatcataatccacatctaaattattaatttcagaatttccctttgaaatatctgtagacttaaatttatcttttaactccagtattatcctttgcgcagtctttttacctattccaggagcctttactatggtcttttcatcacctgtaattatagcatattttaaattatttacagtacaaatggacaatagtgacaaagaagcttttgccccaactccatttatggtaagaagtttattgaacatttcaagttcatctttagtcaagaaaccataaagacctataaaatcctgtcttactatttgagttaaatatatgagaacatcttcttccggcttaggcatattagccatagtattacctgatgtaaaaatcttgtatcccacaccattattatctactattatgtaatccttatttattcctatatactttccctttatgtattcatacaaaatcgttacccccaagtaaaatattatcattttaaaaataaaacctacaggtcgtttaatcataacctgcaagtttcttagcatcttcttttgatccaaaaaccaaaaatccttttcttaaaagatccctagtttcatttttgagctgatttacacttatataagcctgctcattagtttttataaggcttccattgtcatctaccttatatacatttattttatcactatttttgtctttatttaagataaatacaccatcaactttatgattgtttatatatctattttttatgacctcgactttcatatcattgtcccatattacaatatatccttgtttctcataacttctagttatttgttctttagtcattcctgctttatgctctttttctgcattagtttcttcacttgatgttaaaacattattctttgtctcatcttctggatcaaaggttatatcataattttgttttactatcaaaagggccaaggtcttttttccctctttattatttgaagtgtatctagctttctcactttcatttcgtcccaaaaattcatcaatgcctttggatattttatatttttctgcattcataatcttaattaagtttcctctataccctatgcaaaatgaaaaaataaaagttactaataaagccacaacacttaaaataactttctttttcagtgtcatactatccctcctatttatattggatagtattaacacttttaatattttttattcaaaattaactatataaaatatgctaccaactattatatatcaactatttatataattgcaaattaattataggatttctcaacctttaaacagctaagaaatcctataaaaaaattagttaatatttatattatgacctatacttatattttagatttgtctactaaccaaaaatgtaaactccttaagattgtgtattccgtcatgagaagttcccggctcatgtaaagacatctttccaggtttagttactatgctaacaccaagtaaagtcattttttctatgaattcttcgtcattgccgctatatcccatagtctgaagataatcctttaagttttcagagacgtaatttacaacatcgcttttacttgaataaggacatacaaatataaatctataaaaacatttgtttatatcttctttttcaggcattccatctgatagaattactgtataatcagcattgaaggaagaataaactttaaatcttctttcatttttcattccatatttaagagtacagtattgtctgtcttgtattgtcttaactgaattccattcacttaaatatgccttaggtataacctctgtgatttttctaagagaagccgaaagacaatgtgaaaattcatctacatctatcttatcatttagaaatactaccctaggtgataaacaagccttctgttcccaacatattatatcctttgctatctcctctgatactttatttaagtcatcacatttatcaactacttcaaaacttatttttgctccatgcattatcatgtgtttttgatactttgcgcacatttcacctattattcttgaagaatactctccaccccagtgtataacaccatctgaatttttaacgattgtgtcatagatttcagttttactactatcaaagtacaaaacggatagcctatctttcacagtttcatctaactcacatagacttttataaaatgcatacgcaaaatatggttcatctttagataccttaactaaattacagttttttgacaaaagacccatggatatgctcattggtataaccacgaaagcatttcctgaaatattatgaaatataatccctcttggctgtctatgctcatagccataatttgttttgtgccatgaatctaaaatatctacctctccaagttccctcttaatagtattttgtatattttcacgaagaagcatttgcatcatactcttaaactcataatttactaattcaaaactttggtttgttatctgtgctaatgtttcaatatgcttttttgaataattgtcatcaagccataattttgcacatctatcaagcaagtcaattgtttcctcggtttttatatcatgaactttatttttattctttttaagcctttctaattccttctctacatcacctttaccgcttgtcataagttcaagctttaatttattaacttccttaatagttatctcttcgccacatgtaaattcaagcttcatttttgtttcccccttacatctaaagtagctccgcatccttttgcttctgatcctttaactcttccaactatcttaaatgtcattccttcatgcttacattcagggcaagaatcattagctactatttctgcaatatcatccacaagtatagatgctccagcaaaagaagatgttccataagcattcaaaacctgtacaagtcctctatcaccaggtttatttagtggctctaaagttttcacatctcttattattactcttccccatgttggaacatgaaataaataacttctaagcttttctgaataatgtccgtccattggaaatgtgttttctgtaaatgaataagtatcacggaaatttttttgaggtatgcctagaaactctgaaatttcctcaacgaattgatatctttctattttagttccaatagatatatttcctttttttccatcccagcctccaccgccagtatgtactatcgctctacttcctaagttatacggaccttttccttgttttttcaattccaaaacggcattatataaaagaagcgttgatcctctaagtgataaatgattatttctctcgttattaaactttagaaattcttcaaaggaattcatatcaactgagaagccttcaccgcaagactttaacaagaaagtagtattttcactaaaatcaaaaatacctaataagtttcctatataagactctgttggcttgtccattatacgaacacttttatattctctcattacttttggttcaggataaaatacacaattatattcacttgcagaatcatagaatttatcatccattaatacaaatttccttatttgcattaaatcagagtttcttctgccaaccatactaggatccccacttgtactacttgataaagtccatttatctaatttatcaggttctactctaagaagactcaaaaacaagtttgcagattttttaaaaagagtagttgccaaaaaaggaatgtttgttatatccttttcacttcttaagtgttcacttggattatatccttgactttcacacaatatcctataggccttacactcttcatattgaccaataatattactttttaagtcatcaaaaaaattcgaatattccatattatgtcacctcacatattttacatttattatatttttttctatattataattataattcaaaaaaattctattacaaattaggatatatactgtatttatcattatagcttcttaattttaagtatgaccagtcagtctagttttttcttaaaattcattgattttcctttaataagtcttaaaactataaataaaattatataacattaaaattttaatgcattaatgttccaatatcaatacctatatttagaattaatttaaaatgtaggcatattatttaattctaataaatggtataattatattattatagaaactttgtattaatattatagaaaggagaagttttaaattaaaataagcatatgaatagaaataacttattagaattcattaatcaaatgtcaagagtatctgataaatacataaattccgaaaaaacagactttgataaagcaaattatactattacgcaatttaatgatgaaatttgctgtactattgaggatactcacattatacaaatcaaatctctgtatgttggtaccgtaaatatactaaataataaaacaaattccctgtatgttgaacttggaaatgagattgagtgcggccaaaccttatgcaccattaatcatttaaaaatacctataaatattgtttcaccaactaaaggcatacttaccaatatacttgtaaaaaataaagatattgttcaatatggtgaaatacttttcgaagttaccaaaaaatagactatacatattatatttttttactttaataaataagaatggcacctgtataaaagcgccattcttatttattaaattctatttttcaataattattatcttcatagcttcaattctcaaacttttaccgacagtccctgctgtctccccatccttaacccagttttgccatccttggttttggacttcagcttgatacaaaatactgtatttatcagctccagttccttctagcattatctgtagagactctattcttaatccttttccttctgttcccgttagagctccattataaatccagtcttgccaccctatattttgcacttgagttttatattttatgtttaaacctaccggtgtgttatttaagtttattttaagtgcctctactcttaacccttgtccttccgttcccgaaactgctccatcttgaacatagttctgccaccccacattttgtacatgactctgataagataccataggtggtttttcagtaattttaatttttatagcctcgattctttctgattttccaacagttccagctgtctgaccatccctaaaccaaggctgccagccttcattctgtacatgaacctcatactccacactatatttatctgcatccgttccctctagcattatttgaatagcctcaactcttagcccttgtccttctgttcctgctagagctccattatatacccaactctgccaacctatattttgtacttgagttttgtattttatatttaaacccgccggcgcgttatttaagtttattttaaaagcctccactcttaatccttgcccttctgttcctgctagagctccatctttgacataattttgccaacctatattctgcacgtgtgcttcatatataactgatggagtggctactgccaaattctgaccaattccaactgtatcaaaagcattattcacagctgcaacctccgctgaaccacctccatacaaatctacagcggactctactaaaacatttcgagcttcattaaaatcagtagtgggagtcatataattcactaatgccctgtaatatattcttgctgtcttttccataccaatactttgtgcaataagatacgctgccttatttgttatacctgaattagtatgtactcccccaaaatctccagcttcattatctggaagattttcatatccactcatgttatctggttgatcatataatgcaggattaactaaacttcttaaagcatctcctttaatttgaggagtataaatatcatctcctataacccaatcactaggattaatttgccatgtccctccagctgcaacattatacttagtatatgtttctattaaaacaccaaatgtatctgcaattgattcatttaatgctccttgttcattatcataattaagatttgcagtattctctatcacaccatgagtcatttcatgtccaacaacatccaagtctccactaagataagtaaaattcaagccatcaccatcaccataaatcatttcctgtccatcccaaaatgcattattatagttttttccgtagtgagtataggattttatagccatactattgttatctaggctatttctattaaataaattcttataaaaattaataaccttacctgcattgtagtgagcacttacagctgccttatggctttcctgattaaaattgcttgtactattagaaactaaagtccctaataatgtagtattgttataggaataagtattaatataacttgctgcagaattcgatatatccttcatttgatagctactacctgattgatacaaattaagtgttctagtagttccagatacatcaattcctgtgcccaatactttaccatcatattttatattgttttcagtcttaattacttttcctgaactaatatcaacaaaaacatcccaattccctatagttggattcgtatagtaaatattcaccttaaatacttcataatttttattattgtctgtcaaaatcgtttttatagccttaggtgtattttctaaggttttataagtaaattgttttaatgctatattaacagcatcctcttcgtttatacttatatttccaagccttgttacagttttatttttttctatagttccgtttacacttacaactgttccatttttatcaaagtgcacatttaatattctatcttttacactaactccattaattacttgattaaaccttacaaaagtatctccgttagaatccttctttgtgcttataggcttaagttcattttgagcactatcaattccaaatatctgcttattatcttctagaaattgggttgcttctttttcacttggtactttctttttagaaagctttcctgcaataaatacttgtccgttattttgttgaaattttattttttctccatttatattctcaattttttttacaacgttaagcatttgtgtatactgtgatgtttctgtacttgttgcagctttctcagcatatataggcgctgaatacaacataactgatgttaaaactataaaagcggataatatctttttacccactcaaatcacctcatttattttttaaatgtgcagcaatattgtaccaagctatttattatacataaagaattatttttcgtcatttttttctgtagtttaattatcgtgctattatttttcaaataaactttaatctaataattttttagctattgtgcacataaaataaaatcgttcttgaatttttacggaaattcaagaacgattttatatatagacatctataaaattaaacctaaaaaaattatttcacatatactttttaaatttattattgtacttagcttctaggatcttttattttcctacttctatccccatcttttccaagttttcttgattcatttgaaaatcctacttcatttgaggtttcctctttcattttttttaattcagcttttgtttttttacccgcttttttatttgcttttgaatttttgttgtccttatgtgacataaaaattccctcctgtataagtagtttgaatttaatcacatcataagtttgccccaaaatcaaaaaaatataattaatcttacttgtataataaaacacctcatttatataaatgaggtgttaacttgtattatttacatatgaaatcaaagcagatttaccacattatattaatatataaactcaataatatatttcaatcattatatcatatatgtaatccaagtatttttcatttaattgtcataggttctcttattcagataatcacaataaaaaacaataaaatacagtatttaacatttattctaataagctgtatactttatttgtattaaaaatacattaaatcaaacttaaggaggatttaaaatgaaaaacttaaaattaaaagctttatctttaggaattatttctactttattaatttcttctagttcttttgctgccactactactaaaaatataaaaaattcattttgtaaaactgcgattgcttctaatttatataaaacacaaaacgctaattttataactaaactaaataataaagtaagcaacagaatgtttggtagtccttctggagtatctacaccattccaagttatacctgtaaataatagcattcctggcatatatgcatatcattttgttgcaacgggttcttcattggaagatataataaatttcgatcaaagagcacgatactttgaattagttttaagagattcaagtggacatattgtagcatctcatacatttttaaatgcaggaaaacgtgacgaaagcggacaaccacaaggtgttttaaatttagacgtaacattacctcaaaacgtaaaattagtaccgtacgcatcatattcaatggaaattcaaaatttagattcagtatcaataggtggtatggaaactttgtattactaattgctaaatcctaagcttaatcaactaagcttaggatttaataatttctttattctatttacatccaaagttcttattttcattatacatattctcatttttttacatattacatatttgaaaacttatttatttaactattcccttattcacatcagcttcaactgtcttgataacaaaatcaactatctcttttatttacgctctagttaagtaatcgccatatttattatccaatttatctagcaaatcagttattttttcttctgcaaaatcctttggataaagcttagctaattgaatcaagaattgcttacattaaccttaaattttaacttatttgaattaaccacaaataaatgtatttgtttgtgcctttccttcgatcaccattaatattgtttgatggcttaatatcttttttaatattttatcatttattacgatatttgaacttgtattctactttataagcatttttatagatcttatatgtttttttagccttatttacagctttgttaatgttattgcctatctttttacataaaagtatatataccgatgaaattgagcctctctttctagtctttataaattgtttttcctttatttcttttaggactcttgaaatggttcttattgaataatgtaatttttcagcaatataagattggaatagatatacttctgtcttctctctgccattttactttggaagttggattttctttaatatattcttgctgtacacaatatacacaaactgctcttatattttttaatatgaatagactttaagtcttctaattgaataaaaaataacaccttcatatgtgattgttacatctacatataaaagtgttatatgttatcgtaaaacgataaaaacatgtatgtcaccataaaatgtttttattaaaacgctctcagccctttatccttcaaaggcctcgtcaaactcagcattgtgatatacatcttgaacgtcatcactgtcttcgagtttatctattaatttttgaactctttcagaatcctcaagacttaatttaacagtattatctggaaccattgttaattcagcagatacaaactcaaaattttctttttcaagagcttcacgtacatttgaaaactcttcttgtgctgttgtgattatgaaaacttcttcctctgaagcgaaatcctcagctccaaaatctaaaactttcatcatgagttcatcctcatctattgaatcatttttttcaattacaatttgtccttttctctgaaacatccaagctacgcatccacttgcacccaagtttccaccatttctatcaaaacagtatcttacatcacttgcacttctatttttattatcagttaatacattaaccaacattgctacacctgcaggaccatatccttcataaattatttcttcataatttacaccttcaagttcacctgcacctttttttatagctctatttatagtatccataggcatattagctgctttagcttttgcaacacagtctcttaactttgaattagcatcaagattagctccccctgtcttaacagcaacagctatttctttacctattttagtaaatacttttcctcttttggcatccgccttgccttttttagcttgaatattatgccactttgaatgtcctgacatatcttaattcctcctaactatatgtaaaaaaacctatagggttataattataatacaattccctatgctataaaagttacttaattttataaacacatacgtttgtattatatcacaaagaccattttgaattcaattattcttgaaataatctattatcacccttaaagtagtatgcttctttaccaacattaaactttaaatttccatgacatatttcagttacatcttttcttacttcctccagcttatcactttcacagttaaataaaatattaacctcatctgtataatctatgttttcaatatgccaattcttattcgaaaaatgatattgaagcttacctaaaagatcatagtttattcctatagataatggtactccctttacctttagaactatacctgcttcctttacagcatctgaggcacttctagaataagccctaacgagcccacctgtccctaaaagtattcctccaaaatatcttgttacaacaatagctgtatctgttattccatttttcttaataacctcaagcacaggaactcctgctgtaccttgtggctcaccattatcactacacttttgaatcatcctgttttctcccacaatatatgctggtacattatgagtagcatccttgtgttcattttttattttctccacaaactcctttgcttcctcttccgactctactctctttatatgtcctataaaaagagatttcttttcttcaaattcaactttaatttctcttccaaccgttaaatagtccataaattttcacttccattcaacaatgttactttttttattttaatatgctgtttataacatcaattcctctttgaattttgtcctcattagtctttgaaaaaccaactttaaaataattaagaccgttagctgcatctttataaaaaaatactcctggtgtaattaatactttatttcttttacattcataaaataaatcaatgcaactcttttttattaaatcatttattttcaaataaaaactaaaccctcctccaggacttataaactgcactttatctttaagaacacttgaaaaattatttatcatgaaattatatcttttttcatatataatatttatttcatttatatactttttccaataaccatttttaatatataaatctaaagctctctgcatcaaactagatgtagatatgtcagtatttatttttgagttctctatttgctccttaattttacttggcataaccaaataacctattctaattcccgggagaaatattttggaaaaactctttatgtatataactctgtctccttcgtctatagccttaaaacttgtataatcaatacgctcatcatatcttatttcagaaagataatcatcttctatgatatagaaatcatacttattagcaagctctattatttttttctttttttcatagctatatgataaacctgttggattttgaaaatatgacatggtataaaagcattttatattatttttctttaaaattttttcaaactcatctatattaatgccaccacattccatatctacttcaaatatgtttgctcttctccatttaaatatagaaagcgctccactgtaggttggcttttctactattatattgtcatttacatttacaatagcttttgatattatatctataccctgctgcgctccagaaactattagtattctctcagaatctatctctccattccaaaaatacttacttatattactcctaagcccttcatatcctaaagtttcctcatacgataaagcatccactccatccctatcaagaacttcatttattacctttttaaaattatctactggaaaaaactctgcgcaagggttctcttctgcaaaatcaacatagtcatcatagtcttccttgctaattcttttaaatgtatttgaatagtctcttaaaagtcttttatttatatctcttttttttgcataggttccacttcccatttttaaaaaagcgtatccttcactctgaagctttttgtatacattaactatggtatcattgttaacacctaaaaactccgatagctttcttatagatggcagcttttctccatcacaaacttcaccattatcgataagtttttttatatttttagctatttgaatatacttaggaatttcttcttcaaaacaaatcttgtacttttccattaaaatcaccttttataagtaatatacgttttccatacaaagagcctttccatcctttatgctgtacttacgagttcccttttttattatattaaattcccaaagcttacttaatatttcctcaaaatttatagaaaaatcattaaatacaggatcagtattaatatcttctgcacttaagcttttatccttatctctcatataatcaattaaaatagcggtaattgactttatatttttatttatgaattcctctattttatcaacaacttcttttatagcctcttcaacattgtcctttgaaaaaaacaggttgtctatataatttttaaagtcgccgtttatattagtcagcatgttaacatcgtctttatttaccatatatcccgagtgattaatatacaacttggaaaattcctcaacacattttacagaaaaatagtatgctgtatatatccttttattatttaaatactttttgcataatccaagactctttaacaaatcagaaatatataccatattccatttttctctatcaatatcaggataatatcttccgctgtcgtatttttccgttatatccttatcttttgaaaatacaagtttagaagaggcaaatatcctgtgaaaaaagcctccctttatgtcattttcatttaaaagtacaaatttattttttcccataagctttatatgaataggtacatcattttgttccatataaatattttttatattagccatttcttcatctattataacaaataaatctatatcagattcttcccataagtctccagatactatgcttccaaataccatagtcgcaagaactttctcatttgactttagcaatttaactatagtgttatatgctttttgatattttaatatatcgttttccatgattaaccctcctgcaacagtacttacatcatatattccttacatctattataaacctcattatcaactattgctacaatatgagttccttcgttttcaaactcttctttttttacaacagatgtttcatgaatatacgcagctaccttttgatcagaatatggaactaaatactcaacttctctaatactacttggaattttttcagcaattttattcattaataaatcaagattaatcttttgttttgctgatattttaacaagctccttttccttaatactctcttctattttgagaagctcttcctctgatatcttatcaattttatttaaaactaatatctgagttttatcatttgcacccaattcctctagaactccatttacagcttctatttgttgtaaaaaagtatctgaagatgcatcaaccacgtgaactaataaatcagaatatattacctcttctaacgttgacttgaatgcttccacaagatcatgaggaagttttcttacaaaaccaacagtatctgtaagtactgcttttcttccatcctcaagctttattgctctagttgttacatctaaggtcgcaaaaagcatatctttttcaaggacattttctttccctaaattatctagtggagctgctatttcacatattgcatttctaagtgtagatttacctgcattagtgtatcctacaagagaaatacatggcaaattttccgaaactcttctttctctttgcacctgtcttgttttctttatcttttttaattccttttgaatttcataaactctttcatttatatgtcttctatcaacttcaagcttcttttcccctggtcctttagttcctatacctgctccagttcttgaaagtaccttaccaagtcccataagcctaggcaatctatacttaagctgtgccaattcaacttgaagtttagcttcctttgatcctgctcttcttgcaaatatttcaagtatcaaagtagttctatcaataacctttaaccctatagcttcttcaagatttctaacttgagctcccgaaagttcatcatcaaaaactataatattggcgcgacactgctgagccaataaccttatttcatctacttttccttttcctataaaatatgcattatcaatcttttcttttttttgtataaccttttctgcagttaaaaccccgcatgcgtctgcaagttcctttaattcatctaagctttccaatgtatccacaccaactattatggctctttctgaatcatcataatcaagctctaatttatccatgtgctcttctgcatagttgatttcatccataaacttataatttaaagcttcctcaaagcttgcggttttaacaattttaggaattatactgttatcctccacatcgcaaaaacctatagtcacacctgttacttttccatcaactgttcctactgccactatagaatccagtctagaatttaaaagggatgatatatctatatccgaaagctccggattgccactagggtgtgtatgtattattctaattcccgataatcttttttccttaaaatcaaaaacaggtgtctcaacacttcttgcatctcctatagaaacacttacaactttaccttttctattaataccaacacttatttctctctcgattatatttgttacactacatattaattttataagttcagcagtgaaaatattttcttttgaatacatatcatataatttttcaagttcattaagtagagaattttttactccctgcacatttcctgatatcataattttatttcctccttaagcactactttaaagcaaacttattttatattataccatttatgagatgaaatttatacaaatcttatattatctatgtttacggaactataaaacccgaatttttaagactaagccccaatgctgaatttggtatcttaccaactataatagtttctgctacaggaatttcatttttaatctctatatcatcataagccattggaatcataaccctcactttagttttaactaaaatcattattatatgcctagtttggttaattccagctccttcaaactttgataaatattttgtttcaacgtgtcctatttgctgagctttaatagttaactctggtcccatatacgataatatattattcttaaagatatatcctaatggcattttaatgcctacttctcccaacttgttaatatcatactgagattctagcgctacatcacaagctagcttatttaatattatggtatttgccttcatcataactatattgccatcattatctttatctatttctattattttattatagctgtaattttgattatatacttttgacatatttacattaactatttcggttattttcgacttgatttgcgaatcagctgttttaattgccacaggtgttattaacttatcaaatgcgtatataacactattgaataatactaacataaatgttaatattattataataattacttttgtctttttactaaagatatatcccacctctttccatatttacggtatatttttttaaacaattaaaaaaactccgtaataatcaattttttatttaaaatagcagataattctatggaagattatttaactttagtttataatatggttaactacataaaaatattattttaaaactaaaatagcattcatattttagaatacagcaatttgttattataataatgtgtggtataattattcaacatagtttaatacttttaaggaggaagttatgtctgataatactaagactaacagtagaaataaatctgttaaaagaacaaaaaaagtgaagaagaaaaagaagtttggcttctttaaaaaattgtttactatattattttgcctttttattttattatctgttgcagcttctggagtaatatttgcaatagtaaaaacatctccaaatttagatataaatggtacaatattaaatttagatcagccttcacaattatatgatgataacaataacccaatggatacagttgtaacaaaccaaagacgttatgttgtcagtataaaggatatgcctaaaaatttatcaaacgcttttgtaagcattgaggatgaacgtttttacaaacacagtggaatagatactaaaagaatacttggtgcattttacaacgacataaaatcaaaaattcacaaacaaaatagtatccaaggtgcatcaaccataacgcaacagctcataaaaaatagaatgtttttaaacgattcattagaaaatagaatttcatttaaaagaaaaatacaggaagcttatttatccataaagcttgaacaatcactcagcaaatcccagatactggaagcgtatatgaatacaatttttcttggtgttcaagctaacggtgtagaggcagcttcacgacaatattttaataaaagtgctaaggatttgaatttaattgaatgtgcctttattgcaggccttgcacaaagtccatcagcatattatcctttttcgcaaaatgtagctaaaaatccaaatatatatttagatagaacaaagctagttttgtataaaatgagacaaaataactatatagatttttcaacttatcaaaatgctataaatgaccttaacaataataaattagctttttctcagcaaaagatttctaacaagtatacctatgagtggttttctatacctgttgtaaaccaagtaaagcaagatttaaaatctcaatatcattatactgatgaagaaatagattcacttcttagagatggtggactaaaaatatatactactatgaacacatcaatggaatcaaatgtacaaaacatattagacaacaacagcacattaaaaagctatagctatgcagataaaaacggtattattcaacctgaagctgctgcaactttatttgattatcacacaggagaaataaaggctattgtaggtggaagaggccaacaaccaccttcatcgtataatagagcggattcaagtaactatttacgttctgtaggttctagtataaaacctcttacagtttatgcaccagcaatagatactaaacttgcgacagaagatactatagttaatgattccccactttcatcggatgttgcagaaaagtatgggtcaaatggggttccatataatcctcataacgatgatggtggttattcaggtccagtaaatttaaagacagcattaaccaagtcaataaatcttgtagcaataaagttagaggataaattaggactttcaacaggagcagcttatgctcaaaaatttggtcttactcttaacaatgatgataagagtagtattgctgcattatctcttggtgaaattagaggttcaaatacaactactatggctgccgcttacggtgtatttggaaataacggattatattcagaacctaggctatatagaaaggtagtagataaaactggtaaggtacttctggagaacaactattcaactagaaaggttatttcaccacaatctgcttacataatgtatgatttattaaaaggtcctgtaagtgcaggaggtactggtagttatgctagatttggtgacatgccggtcgctggtaaaacaggtactgcatctgattctaaaaatttgtggttttgcggtttgactccatattattctgctgcagtatgggtcggaaatgaccagccaactaaactcagtttaggaagtaatgatgttgctgaaatatggggcgaaattatgaaaatggcaaatgtaaatttaactgttaaagatatcgatgctcctggtggggtaacaaaaattggagattcatattatatagatggtactagtccatctaatttatctggggatgattcttcatcttcaactgctagtaaacctcaaacaccaactactaacactcaaaataatacgaacaataatgttgctaatccaaatagtaacaatacaactaatagtaataccagtaactcaacagagacaccagcacaaaatactcagcaacctactcctacaccaacaccttctaccaataatacgcctggtaatacaaacactaataccaatactaacaataacacgaatacaaatactaatactaataacaataacacaaataactcaagttctggaaataacaatccaccaaataataacacaacaaatactaataaataaaaaaacagtatgtgcaaccaaagataaggttgcacatactgttttttattttaatttttatatacacttctctcattataaacattgataagtaattttattgcattagttagtataggacaccctttattaaaatcatcacatccatccatttttccaggatcacctattccaataattacaggtatttgatttgggtttattgtgtttacagtgtcacctattattactttattatgtcttgcatttccatatttatcaacagcacattctatcttatttccacatttatctatagaataatcaacctttatgccacttcctaatgtgttagaggctacggctatcatgccaattacttttatttcttgagacttaacaatatattgtactatttcctctccctttcctctgcctatatcccctttatcatctaccattacaattacaggatctttttttgcacatttaataagtctcagcacctcatctcctgtaattttacttggatttccactagaaatggaaatgcatctcccatttatattacctgcagccttctccgccgcttttttagcaattttatctccgtcagttataattataactctatatttcatattaatttttcgtcttagaattaaataataaagccattagatatccaaagaaaactgccccggtaattccagctgctgttccctttattccccctgtaaacgctcctataagtcctttcttatcaacttccgctatggttgattttgcaagtgaatatccaaaacccggaagtggtactgttgctccagctttaccatacttaacaagaatatcatatatatcaagcgcaccgagaattactccaagcgtaacaagggaaactagtatcatagctggtgtaattgaaaacttatccataagtatttgcacaataacacacatggctcctccaactaaaaaagatgctatataactactcatttttcattcctccaaactctatagaaacagcatgtgcaattcctggtattgattcaccttgaagatttgaagttgtgctcataagggctcctgtagaaataagtaatgctttcttaattttcccacttaacatattcttatatatatatccacaatccacaactgccgaacatccacatccacttcctcctgaatttgtatcctgttcatcacagttaaagattttctctccgcaatccatataaatattactcatgtcatagccatattctttttttaagagatcttcggttattttctttcctactcttccaagatcccccgtagctataacatcataatcctgaggagttctacctgtatccttaaaatgctgttttatggtatctaccgctgcaggtgccattgcttctcccatactatcaggacttgttattccataatctttaaccttaccagcagttacaaacgttatgtagggaaaatcaccttgtcttgcaagaagcatcgcacctgctcccgtaacagtccactgtgcatcaggctttctctgacttccatattcaagtgggtatctaaattgtctctcagccgcagaaaaatgtgatgaggtagctgctattgtatagtctgcaaaaccaccatccataatcattgctgcaatacttaaagactcagtcattgtagaacatgctccatataatccataaaacggtattttagcatctcttgccgcaaaacttgaagaagtaatttgattcaaaagatcacctgcaaataaataatctatatcattttcagttagattagatttttttattacttctgttatcactgtgtaaagcatattgctttctgccttttcaaaactttcttctccattcatatcatcgcttaatataatatcgaagtaatctttaagcggtcctctaccttcttttggaccaaccattgatactgctgaaactattcttggtttactatcaattctcgccgtttgagaacctaatctttttttcaaattaatcaccctatttcattagattaattaaataatatattactcccacaattactgaagagctcaaaccgtatactaatacaggacctgctattgtaaacatcttggcacttacaccaaaaacaaatccttcttttttaaattcaattgcaggagcaactatagaatttgcaaaacctgttatcggtactatacttcctgcacctgcaatatttgcaattttgtcatatattcctatgccagttaaaaatgctcctataaatataagcattgtagatgtatacatacttaaatctgattttgcaacaccatacctagaaaaaatatctgaaacgagctgacccacatcacatattattcctcctactataaatgcgctcaaacaatttttcactgtattgggtttaggttttgcagccttagccaggttattaaaatcagtttttattttttcctctggaacgtccatgtagttccctccctagatatttttattacaaaattagtgtttacatttaacctattttttaaacaaaaaaatagtatacacttaattgtgcatactatttggttagtttttcccttatagccttcagtattcttttctctattcttgaaacttgtacctgacttattcccagcatatttgcgacctgagtttgagttttatccttgaaatatctaagcattattatttgttttgacttgttatctaaactttttataatttgtttaagcactattttatctataacgtctgaatcttcagaatatgggtcacttaatttatctattaaaagaacaggagacccatcatcttgatgaacaacgtcatataagtactgcatactagtagtagattctgtagccattattatttcctctttatctattcctgaaaacttagataactcatctattgtaggctctctatttaattctttgactaacttttctctatcatagtgaagttgtcttgccgtactttttacacttctactaacttttattattccgtcatctctcaaaaatctttttatctcccccataatcataggaacagcataggtagagaatttaactttatagtcagaattaaaattattaacagcctttacgagtcccatacaacctatttgaaaaatatcgtcatattcataacccctatttaaaaattttctacttattgctgatactagcggaagattattctcaataattttgtttaaagcttccttattaccttcatgaacactttttatcaatttctcgttatcgttataattaggctcttctttttttaaagtattttcttttcccataacattagcttccccgctgtttccctcctcatattaatcttcaatgagagcgaacttttttttcattattattttagttccctttcctttttcagattcaacttttatattatccataaagctttccataaccgtgaatcccataccagatctttctaaatcaggtcttgatgtataaaggggttccattgccttttctatgttctctatccctattccttcgtccataacctctattgtcagttccctatcttctatcactgcacatattgtaactactcctcctttattttcatatccatggataatagcatttgtaactgcttctgatactgccattttaacgtcatcaatttcctctaaagtgggatcaagctctgacgcaaaagatgctacagtgacccttgcaaaactttcattttcagattttgctaaaaactttagttccattttattttctaacattgaaatccccccattaaatacttgtgacagctttatctaaactgccataaatgtttattatcttaagcattccagacaactcaaaaattcttctaactgactcttttggtcctactacacatatactaccgccagaagaattaagttttttataccttccaattactactccaattcctgagctgtccataaatgtaacattagaaaagtctaagattacatttttatatcctttaaattttatatgatcatctattttatttcttatctcttctgaactatgatgatcaagttctccaattatagaaaccacaagcttaccattgatatccttaaaatctaaattcataattaattccccctgaaattataaatcaaatgcactaagtatttattctataaacttatccaatttccttttttatacaatactttatatttgtattttttccattttatatatttttatacatgtaattataaaaaaaccgggattttatctagaatttcccggaaatttttatattatattatttattatcttgatttctctttctgtaaaaccgaacttttcataaagcatctcttccttaaattcatgttcataatttaaaggggctggaatacataatttcataagtgtgttaggataatactcatatatgttctctccaagcttcttggcaaaggttttaaagtaaaattcataagttttactatttaaaatatctgttaaataatcataagtaaatattgattcatcattaattacaatacaataaacatccgcactaaaataacttcctttatctatagcaaatctgtttttggaggctttatatgggaaaataattttttttccttcaaatacctgactttttcttccccattgaagctgataccatttccttattccctttaaacattcacgcctcatttgaagcttatatttatattcattaatgtaatttatggcattaggatacttagatggttcatcaataaaatccgaataaattatgtacaaatcatttttattaacattatactttgttacatttttattcttaatccaagttcttagtatttctttttctaaattttttcttaaagctgtttctttgtctactataaatgctttatcgcagccagtaataataccttgatagcttttacaaatgcttcccaatgtagccatgctatttttctcaattttattaattatatctatttcttcatcttttcttaatatccatcgcttactgtctaaagcttttatattaatgtaaaacttatcaattccttcatttgttccattaaaaagtgaataatagaactcatcttttctattatttttcataatcttgggttttattatctctatacttttcctatccccaattcccctttcaagaaaaatcattacagtatctattcctgcctttttaaatggccttataccataaaaatcaacaattttatataaagaacacttttcaactaaaattcttctaagttcctctccgctctgggactccaaaaaatatcttgaagttatgaatccaagttttccatcaatctttaaacaaagtatagatttttcaaaaaagcaatatgatatatccgctttatccttgtaagatgggtacattgtctttagtattgctgaatattccttatttattgactttagtccaacatatggtggattgcttaaaaatatatcatacttaattcctatctcatccagtaagaaatctttacacaaaaaattacttgaaaaacactttgattcacaaaacaaatctatagtaagcacttttattgcatttaaatccacatcatacccaaataagttatttttaattatatggtagtttatattttcttctctaagttctaatttatttatattatttatcttatctaaattttttatatatatatttcttaaataaataaagcatggtattattatattcccacatccacatgcaggatctactatttttaaaaatggattctttattatatcttcttcactaatagtactatctattatgtagtttgatattttaagaggagtatataccactcctctttcttttttcatcgatacaaaattatagtatttctcggaaaaactataattcacatccaaatcttttctgaacttatttatatattttaattttgtttctatatcccctgatttttttatttcattgtatatatcatctatttttttaaaaaaatccgctaacatattttctccaattctaattataaatagctctatatattcgaatatacttcacttaatattttatctttccattctttactatctaaaagtaaatctctgcaagttttttcaagtcttgcttttaactccttatcctctatagatcctatgtttatctttatattcaatattgatgtttcaatagctgcttcagccattattgcagctgccccagcatctgttataagatttttatttcctaactttgctgaaatccaaatcaattcaaaaagttcacgtgcattattggctacatcttctggtacttttgctgcaaattttgaagcttcttgtatacatttatgcctatatgctttttcttcttctgtactttggggaagtttgtaactatttattatttttgagaaagcctccgcatctttatctataccacataagaaataatccttaagcttgtctgatttttctagactgctattgattaattttttagtttctttatcataattttcataaactttttttcctacggtaaagttaaacaccatacaattaagcgctgctgaaagtgctgctgaaagtgctgccgctccaccgccgccaggagttggtttttccgatgcaagttcttttataaattcctctatagatatatcctgtaacataaattccctccaatagtttatagcatttctataattctttgcacttattagaaaactataatttttattttaacttatattttatcatgttttctaaataataaaagcataaattatgtatgagagcaagaatttaacctaagttcttgctctcatattaattatttcataacaagatgctttttttcagagtatggcatactccagtaatttctgtatatatgattttcaatatcctttggttcataatgtgctttagattctcctacttcgcctacaggtgttattgcaacaactgaatatttatctggtattctaagctcatctttcatacgtttctcatcaaaggaagcaatccagcaggttccatagccttcatttgcagctgctaaaacaaaatgttccatagcaattgcactatcaactaaataatattcttttccatttatatgaccagattcagttgtatctcccacaatagcaactaccataggagcatcctttacagaatttttagcatcctcatcactatttataatgaaattcgcaattgcatctttttttctttcgtcatccacaataacaaaactatatgatgttttgtttttccatgatggtgacatcatagcagcattaagcatattatcaagctttggagccgctattggtgtgtttttaaacttttttgtacttgttcttgtttttattacttgatagaaatccataaaatcacactcctttcagtatattttgtgtaaaagaaatatctttatgtatttttttatttaatttatttttaatataaaataagatttctaagctcctattaacttagaaatccctaaataatttttactttacataacttttaacatctataacatctattgattccttattacttttaaagccaccaagtatatatttaaataaagttaaaggctcttttcgtataacaattcttccaaaggcttctataaatatataaattgcaaaaataattttttgataccatttagaatttcttctaacaaatataactctatttctatttaagtaagcataggaaagacttccaaatttatttatagtggctgatcctttgtgatatactttgctttcatatatacacataattttatagccagcatttatagctctagtgcaaaactccgtttcttcaaagaaaagaaagtaattttcagggattaagcctattttctcaaatacttctgattttactaaaaaacaagccccttcaagataatctacaaaaatatcttttttttcaatttcgttgtaatttttccccttaaagtatcttcttgcagctgcaaagtataaatttatatgtgctcccattccctgaataatttctcttctataataatcacatatacaagaccctactattccgacatcctctttttcaattatcttatcaactaatttatttaaaaaatctttttctacaacaacatcattattcaatatacatatgtaatccgcaccattttcaagagcatactttatacctatgttatttccatttgcataacctaaattttccttagactttattatattgtatgaaggcaagctttcttttaatttaacatatgaatcatcagtagaagaattgtccactaaaactaactcgtaattatcataatctatatttccaatactcttaacgcactccaaagtgtcctcataagcattataattaaggattattatatatattttaggatttctaatcatctatttccttacctcttatttcaattatctttgtatacaaaatttccgtaattttattccaactgtatttccctttaacaattttttcagtttcttttcctttgttctcaagattattgccttgcattattccgcagagaacatcagtaagggcctttgaatctttaaaaggaattatttttccattactattctttattatttcagatgctattcccacatcagtagaaacaataacatctccaaaggctccagcttcgattaaagaaaagccgaagctttcatactcagatgtcaaacaaaatattttagcctttttatactcattaaataataatgttctgtcatatatagggcctttaaattctatatacttctttgcatcagtatacttagaaaaaaattcagttatataattcttaaaactttcctcaataggtcctataaaaactaacttccaattagctctaatgtttttatcaatgttttcaaatgcctccattaaagtattcattgacttttcaggacttcctattctccctactgttataactacattttctttatctttatagtttatatcttccttaaatataggattatcaaaatcaagtccattagatacgtttaaaagcttatctttgtatttaaaaagacttttttttaactttttaaatatttcttcctgttctactcctattatatctacccttttcaaatatgaattcaaaataatcttttcaattaactttagattttcaagctttaaaactaaagcattagagcagtctagctttaaaaatatagtacctcttctattaaaaaacttatataagaaggcatacactacagacttaagtgtaacatgaaatatttgaagtacatctatatttttagcttccttttttaaatatttaaatacatttacaaaatgactatgctttttctctataaaatttatctttaatccctttacttcactttcaagataatcatacttgtcattattatagcatgctatgaatgaatccacattgtgaagtctgttaagtttgtaggcgatcatacccacatcctttactaaatgtacattcttagcctcaggataaagcacacaatatttcataaaatcaactctttctcacagcaaatttttttatatcctctatagtaaaatatttaaataaaatcacaaaagttacatagcaaagtgcacttagaactatattaaaaataatatttacgttataatattttaaagtacacgttattattcccatgccaatacacggaattgatatttttaaaaacagagtatactttgaaactttaattattttgtccgaatagtatttcataatcaaaattgtaataacttcagataacactgtaataatggccgctacattcataccaaacttgggtgtaagaagcaaatttataattaagttaaacaaggaagaaattactactgctcttaaatattttttttccatgttccatgcatttaaaccatatgcatatatctctctaatgaataatattaaactatatattaaaagtattgaaaaaggcatatatgcactttcatatgcttttccaaataggagtattattatctctttagatagaataattccacctaaaactataggaacaattacagctataattaccttggaaacatttttaattagtccatgcagagaagccatatttttttcattaaagtaacttatcataagaggaaatacaactccaaatattatagtaactatattggttaaaaaggatatgacgtaatatgcagaggcatatatacctgccattgaacttccccaggaaaatcttattacaattctatcaacattaacatttattgtagcaagaactcctgccagtaaaaatggccacccgtataaagagtatttttttatttcatcaaagcttattttaaagttgatttttaatttttcacgaaagaaatatatataaaactgataaattgttgcaactgcaagtcctaaaactgtaaaaacagcataatagttaacctgtgatggatttttcaagaataatactattaaaacaaacggtattagacttttaataatgttgtataaagcattatatttcatctcctgaagtccattatacacccagtctatacacaatgcattcgtcagcaaagttaagctatacaaaactagaagccaagctatacttcttgagttaaatgacagcactaaagccaatattaatataacaatgaaactaaagccaaaaacaattattctaaaaagcgttatctcaccaactatatctttaatattttccttatttttagaaatctctcttgtaccataggtttgaagtccaaaaagcaccacaatagaaaaatataatgtgattgcctgaacagttgttatatctccgaaaccagatttacctaaaacatgagcagcatatgttcctgtaaaaaaggttaaaaattgtgatacaagtgtagaaaatcccattgaaaagaaattttttgctactttattcataaaaaccatccttatgtatgatgaaaccacttaaccttctcacttaatatataagggagttaagtggttttatattttatatactttttactattttattagactacatttgaagtaagtctatatattcttttagagactctttccactctcttgtaatatcacctgttgtaagttctaacatatagtttctaagtactgaatattttggtcttttagctggtcttggaaattcttcagtagtacatggagttacctttacatcaattcctgtaagtctgaatatctctacagcaaaatcataccaagaacatattcctttacatgtacaatgaaatgttccataatttttttcgtctattactttgagaactactctagctaaatcaactgtacttgtaggtgttccaacctggtcatgcacaacttttaattcatcatgagttttgcctaaatttatcatggtttttacaaaattatttccatctccataaagccacgctgttctaactatgtaatatttaggatttaatgcttttacaaagttttctccttcaagctttgtttttccataagctgattgaggattcacttcatcaaattctgttataggttccttcgcctctccatcaaaaacataatctgttgaaatctgaacaatttcagctccaacactgtatgctgctgctgcaagatttttaggtcctatagcatttattttataagctaaatcatactgttcctcacatttatcaactgctgtatgtgctgcacaattaattaccacatttggtttcttttcattaaaaaatttatttacagctaaaacattagttatatctaaatcttgtacatctgtaggtataacctctacattttttccttttagctgtttttgaatttctcttcctaattgtccatttgctcctgttataagtattttcatatgctaaaccctccatattaatttatgagtcttttaaactcttctaaactataattgttacttatataaatcctcttaagttcataattcccatctgcctttgaagcaaaaccttctttagtacatgctgcaagcctataaccaagcttatgcgctatatctatagtatctctattatactttccgaatggataagctaaataatattccttcttatgtaaaatttcttcaagcctttcctttgaacgttttaattcatcatactgtctatcatatgataaaaaagaaagcttagagtgacttgctgcatgagactctacatctacattatttttcgaaagttctattatttctttatcagacagatagggacatgtatttattaaatctgttattgcaaatacagttgctttaaatccaaattctttaagcacaggatatgcatttacataattatcttcatatccatcatcaaaagttattaatattggctttatagaaaatggttttttattatttatgaagtcataaagttcatcaaaacttataggtgtatatccactctgctttactatatccatttcgcctttaaacttttcttttgacaccttaagttcatcacctttaccgtcttcaatccaatgatacattaaaattggtatcttcatggtattactttggtcttcataaattttgagttctctttgctttttagcaatttcttgtttttttaaatctttactcttctttacagcagataatcctttagcataattagcttttttttcattatagttaaaaaaactaaagccgactatagatgctaaaaagattataatcataaaaactgtaatatacttttttttcttctccataatacatagcatttagtgaactgtcactaaactaattcatcacctttctcactaactactatgtattatgtattaattttcactaaaatatacatttaacctaagcttctatatttagagtatatgcctattattttcaagtcatcaaaaaacactctcttaaatatttttttaggctgtctaaacattctatagaaccattcaagaccagatttttgcatccataaaggtgctctttttaaagttccagcttctatatctatagatgctcctatagctagtgctaccggtaccttaagttcatctctatactgtgctacaaacttttcctgttttggagcacttactcctacagctaatatatctggctttatatcatttatcatttctataatatactttatttcttctggctttttttcaaaaccaaagcttggagaataagttcctgcaactttaagacctttatatttagctttaagattttctcctgccttatgagcaactccctctgctgctccaagtataaatactgtatactccttttctgctgcaagcttacatactcttggaaacaaatcagagccagataccttctcctttacaggggttttaagccacttagatatccaaactaaaggcatgccatctgtcaaaattaaatctgcattttcgtaaacctttttgaattcttcatccttttcaagtcttacaatatgatctacattaggagtaaccacatagtgatattttccatcttttataaatccatctattatttctattgcctctttcatattaacattatctacatttgtatttaaaaacttcattctgtactttgtcaaacctatcctgccataaactttggcagttcacctccctttataaaccaaaactaatgcctatctcctattgcaacaaacatccagaaaaatgaagtgattgatggaacaaatagaaggttatctgagaaattcataaacaaaaatgcactggtagatgcaataaaacctaaataaaatgccttctttatcttaatatcagtctttttgtatgtgttataaagtttcaaaaacacatttacaatagtggccacaaagaatattcctccaaagataccaagttcggattctatcttcaaataagagttatgaacaggaaatcttgaatagtcagcatatctaagctcaggatactgtttcacataagcatcgtaattagcgatataattaccatttccaactcccgataatggatgatcttttatcatctttaaggctgtcttccaaagctttattctcgcatcatttaagttcttattatctatagatctaagtctacttgtaacctgcggaagaaacatagaagctccccctaaaactattattggtaaaattagttttatactgtagattaatgctaatacacaaaagcctagtgctaaccccatataggaatttcttgatcctgttaatgcagcattatatacaataagcacggaaagtatactataaaatgctttcttctttaaatttttttcaaaaaatgcaaacatgacaatggggaaaattgataaaatcataaatgccgctaaggtattaggatttccaaaaacagcggcaacccttaccattgttactccattaactttgtaatcatattggtgcggaatgcccattcctgttatcttttgaaatattccaatgatgctaattaaagtaacagaagctacaaagcttgtaacaaaacccttaaaatgtttttcttctctataacttaaagataaaattatgtacagccctatgtagcaaaaaaatcttaaagattcctctagcgcaagaggtttttccttcgcataagtaacagaaatcatcataacaatgaataaaagtatcaagcaaaataatgttttgtcaccaagcattatataaaaacattccttcagtttttgtctatttcttaatatctccaccaaaaatagaacaaaaattactagaagtaatatatcacttaccgtaatattattatgtatcttcacattataaggaatcagtggatttaaaaatataaacagacatataaataaataattaattttcttaatgctatcattcataaaagactactctctccctttcaaagtatttacatcaaaccctaaacctatttttatagtattaaaatatatctttattactgataacgtatatttatcccttttaaaaggaatcaaaataatattaccaagcattctaagggtaagtcctataacaagattaatcctaactaatacttcctttaacttgccgtgattttttctaaaatattttatcatacttttgtatctttcataaaaagttatatccttgattttgtcgctgcttgccctatatagtgtattatctctccattcggataatacacagctttaaatccagccttatttgcttgataacaaaaatcaatttcttcatagtacataaaatatctctcatcaagcattcctattttatctataacattccttcttacaagaagtgccgctccaacaagtacttgtacctcacgtggctcatctatacttttaaaattcatcatatactgctctacatccttagaacctatcttgcctgacatagcaacaattattttctttaagatgggaatcttaagaatgttttttaatttatatatgtgataaaactctcttttgaagcttggaaaccctgacacagaagtttgatgggacatatccctatttaaaagctttggacctagaagtccaacatctttgttctcatccatgtaattaaccattttttctataacatcttttaataacactgtatcagtattaagtaaaaatatgtattttccactactttcctttatcgcaagattattcgcataagcaaatccaccattaattttactctctataagcttaacccatggaaactcattttttatcatagtaacactgtcatcctttgaattattatctgttactataacttcatatttaacatttttcaccgtcgactttattgaattaagacagtttctcaaaaactcctctgtgttataatttgctataattattgaaatatccaatacactcatcccttctaaccttttgatccaactctattcttaggtagaatggcaagctttattaacgctataaatagtaggaatttaacccccagccaaacaattgaatcaagaaatatattgcccttattattcttcttataaaaaatccacatagctctataaaattcgtatgtagccttatgactaagctgcttactactttcacccttataatgaattatagttccaacaggacagtatcttacaatatatcctgccttccttgccctaagacaccaatccatctcttctccatacataaagaatgtttcatctaagtatcctattttatctattacttctttttttatcattaaatatgatcctgaaactgaatccacatctataaattcatctgctgatgcatatgttaagttgtatcttgtaaactttttattgtttttaaatattttacttaatccaaaaatcttataaaaggcatccttaggcgttggaatcattcttctacacgcaagctgaagtgtaccgtcaggatttaaaaccttgcatccagcaaccccaactttatcatctttcataagacatttataagtttcaccaattacatttccatttacaactgtatcaggattcaaaagaagaacagccctacccttgcttacttctatagccttattattaccagcagcaaatccacaatttactttactctctataaaagtaaaatcttcttttccagtgaatttttcttttataaattctgcgctattatctgtagatttattgtctaccaagatcacctcaaatttaatttcctttgtattctcatatatagaattaatgcattcttctaaaaatctttttgcattgtaatttaatattatcacgcttaaatcatactctaccatatactttctcctaactgtagacatctaaaactaaagttcatttaataacatagtaaattatagcataaatcattatgttattgtacatacaattaaactataaaacttattcaactattctaataaaattatatactttttatcataatatacatgaatttagtttaaatgataatatattaattttcaagctgcaccttaactcttatttagcctcaaatttcacttcacttacaattgaattctttttattctttattatgccaacttttaaaaccagcttacttatccgaaatatacatattaaatatttacataaaatttttaatcaagtataatgtttattgatataattatactcaattttgtgatatacactttaggaaaggttgttttttatgatcaaactcaagaacttaatgaataaaattattaaatttagatatttaatagcctttattatttttattctttgcgttgcttcagatttcaattttagctctttgcctgcatgggaaacatatgttccacaaaataataatatttcttctaaaacacttggcaaaattaggtacataagaactgatgaatggtttgttcaaaccccattttatatggcacaagctatgaacaaaaatcattatccagttaataataataatattggcgtatccggtcaaaacatgattttaaattataatgctccagtacttgatattacagtactatcgaaaccatttaactggggttttttgcttttaggtaaaggttatggtttatcatggtattggttctctaaattattgttactaattttactttcatatgaaatttgttacataataacaaaaggtaataagccaatatccgtgcttggaagtctttggataacattttctcctgctgtacaatggtggtttatgcagcatataggcgatttggtgttttattttgaagctattattgttacctattactattttttaaaaaatctaaccacaaaattcaaaaaaatattctttgcatttgcattttccttaagttgcataggttttactcttgtaatatatcctgctgttcaagtcccacttttttatctaggaataatatttatggttattctttttatgaatttgaaaaaagatttaacatttaaaattagtgacatattaattattattcttagcttcggatttatagcctttaatctaattcatttttatctaatttcagaaggatcgttaaagattttattgaatacagcttatcctggtaaaagagtaagcacgggtggggatttaccttggtatgtgctaaatatttttctaataaatccattcctcccatttaaagattcaacttacaagaacaattgtgaagtcagcaacttgtataattttttctttccactaatattttgtgtgccacttttagtaaaaaacaaattaaaacttaaaattaaagatttaaagtttggaatttgtctaattgcatttgctcttattcaaattttctttatgttttttaagataccaacttttttatcaaaaattacattgttctcgtatgttactggtgaacgtcttttagttgtatatgctttaacgtctgtttatctaagcatatgggcactagctttaatttctaagaagaaaccttttacaccaatattctcattaattgtaagtgcaataactacattaatatattatattacaatttttcattctccatttagaatatatgttactcctatatactattatttaatactagctatatttttcattttaagttttctattggtatatggtaaaaaaacttattttactattataatggctattatgataatagtaactggcataactgtaaatcctttaacaaaaggtgttaattccttgtataataataatttatcaaaaaacattatctcaatatcacaaagtaacccaagtgctaattggatatctgtagataatactggcggtattatgggagcctttatatatgctaatggaggaaaatgtctagatggtgtaaatttttatcctgatctaaaaaaatggaaattacttgatcctaaacaccgtaacaaccttatatataatcgctattcacatttttcttttaatttaaccgacaaaaaaacatcatttaaattattagctcctgataatatagaggtaattttggatattaatgatttaaagaaattaaaagtaaaatttattctagcacaatctagtttagataactatgcaaactctaatgttgtttttgacaaaatatatcaagatagagtaaataattacataatatataaagtaatttataaataaaaaatctatttacttgaatttattgcaattttattttaaaataaaatctgtaataaatccaagtacttatgttaggcaaaacttataatcagtttgaaagggtgttaattttgaaaatagcagttttaattccatgttacaacgaagaattaacaataaaaaaggttattaccgacttcaaaaaggtcttaccagatgcgtatatttatgtttacgataataattcaaaagacaatactgcagcaattgcaaaggaaagtggtgctatagttgtaagagaacctcgccaaggtaaaggaaatgttgtaagaagtatgtttaaggatatagatgctgattattacattatggttgatggtgacgatacataccctgcagaatttgcaaaagaacttcttaaaccaataataaatggtgaagctgatatgactataggcgatagattatcaaatggtacatatgaatccgaaaataaaagagctttccacaacttcggaaacaaattagtaaaaaatcttattggaaaactgttcaaaaatgatattaacgatattatgacaggttatagagcatttaacagatattttgtaaaaaccatacctgtactaagttcaggatttgaaattgagacagaaatgagtatacatgcgcttgataaaaaatttcttttaaaggaaatacctatagattatagagatagacctgaaggaagttcttcaaaactcaatacatacaaagatggtttaaaagtaattaaaacaattttattcctttttaaggactataagcctctaccattcttttccatattggcgcttttaatattcttaataggattactagttggttcacccgttataatagagtttgtaaaaactcatcgtatatcaaaattaccttctgcagtcctaactatgggtcttattacttctgctattatgttctttgtaaatgggcttattttagatactttagtaaagcagaacaaccaaaattacgagttatttttaaataattataaatctactaatcctgtagaaaattatactgataagtaattgtaattatatttttaacattatttatatataaaaaaagaagaaagcttatttataatgagctttcttcttttttatttttataaattctttgccataaatcttcaagttataatattactcttaattaaatgaaggtatatcaaattttaaaattggacttgtacacatatcaattaattttttgatattatatatttgattatacgcccatcttacatcagtagcatattgatgtgttcccggatttgccggattccatctcatcttatatagagtattttgagcataacttgaattatttatatagctggatcctatccaactagctccacctataatagccttatctacagttgtccatccctgtttatatgcaaattgggatccatagtaattaggatttgaatctagtgcatttattccaaacatattgtaaacaattgtaccatttacattcattccttttgctaaggcagaagttccatttcctgtctctaaaagcgcatgagaaactaaataaaatacactgatattattttgctgagcagattgaagaaacgctcctccatgtccctgcaacacgcctttacctacaagcatattattaacttcatcaacagttatccctgattggtagttcaaaactaaaaattgatatataccataactatcaagaaaattattaggattagcataatattggactgtacttctatctgctgaaacccaagaacttcctgattctgtaactggctctccatactgcatttgcttatcaactaactgtgatagtgaagtgttgtactttgtacttgaagcatcaactccaaccagcttagtaattttaaagctttgagaagtagttttaccaccattatcataagccgttagagtaacagtatgtagtccatttgttaacccagttgtatctaaagtataattaaatccacttacatctgcattttgatacataggatatgcattcttaacatcaggtctggaagaaccatatgaggtatctgccttatactgtccatctacagaaacagtcactttttgaattcctgtagaaccaagtgcccatcctcttaagtttaagttatttaggctagaatccttaataataacatctccacttggatcatctatacacatcataggttgtaaaaccttatacgttatattcatagatttgtttagtatctgtgaatcctttcctataacttgaacttttaatgtcttgtttccatcagttaatatatttcttcctattgaaaaagaataattaacttgtccaccattcacagaagtaatatttgcttttccaagtaggcttgtgtattcgtacacatcaatttcttgaattccattggaattagtagcactaccacttaagttaatagtttgattatcataaaatacacttccagcacttggtgatgctatactcacactaggagctacagcttgagataaatctctaacaattctcattctaattgcctgtatattctgattggggtctccagttatagcaccatcctgaacccaatccatccaacctacattagccacatgtacctgatattgaatatgatagccggatatattattcaactttatttgtatttgcctcattgccaaggcttgtcctaccgtccctacgatattaccattttgaacttctgacatccaacccttattctctacgttagcttggtaagatatgctggatcctgttggtaaattatcgctgtttattttaagagcttctagatttacgccctttccgacagttcctgcaatatccatgttacttgtaggattcatccagcctatattttgaacctgtgcttgataatttacatttatgtcaccagtaggctgagctggctgaggtgtaggctgcactgttgtaccatcttttactatttttattcttattgcctcaactcttaaacctctaccactagtacctgcaactgcaccatcttgtacccaatccatccaacctacattttgaacatggacctgatatgcaacatggtaatttggagccccagcaagattgatttttattgcctcaaccctaagtccttgacccgtcgttcccgcaactgcaccttcttgtacctgcgacatccaacctatattctctacatgaacctgatagttaatagtagctccaggaacaacattactatttaagaggttcatttttaacgcctcaattctaagatcttgtcctgttgtgccactggtatcaccatcttgaaatgcttgctgccaaccaatattttgtacatgtgatgaatattgaattcctaaatcattagtctgcgcatttactttgcttgaaaatatagatataaacattaaaacgaacatagcaaatattatgttcattttcttcgtcattaatgttcacctcctttcaaccataaataaaacagcatatattatttttcgtaatatatactcataaattgagtaaaatataaaatttatatattaaaataatatctaaacttaattgatattactctatttatcttttcattttgcacttttgatttaaggtgttaaatcatatgtgtatgcaagtaacttattgtaaaattaatacataaattcacttaaaatttttgccacacacgtataatattattattttatgcattctaagtcaagtaaaattagcggttaattcgccacaatacatttaatttacttatttttatacaataaatacacagtaatatattatttcatcattttttacactaattatattttttttggataaaaagtataattataactttaatattttaaataataacatacatacttatcacgaacatggaactaaaaaaataaccatccactttaattggatagttatttttaattctatttacgaaactttttttttattatacgcttgatttttgatataactctaacataataatactttatcaagccttgacttttgtaaaaaaactttaccttttttattttatcagaagatatatatggattctcacaaaattcaattaatggtttaacaacgttactccatttatactcttcttttatcttactaatgttctctttcgcttctttatacttatcagtatcatcaagcagtttaagtattttatcagctaaattctcatgatcgcccgcttcatgacaaaatcccaaattgtttttttctacaagctcagacatataatcaccacttgtaagaaccataggcaaatcgcaccataaatagtccaaaattctggttctaaaagaatacctagtctcaagattattcagatatgtacttacacctatatcagcctctaaaagataattttgtctttcattgtaatctacccattcattaaaaaatacatttttattataaataccgtattctttacttctttttatacattcatctgctacagtagtatctacatttaagcttggatgaccaattcccataaaaaataatttaacatcctgccttttacaacatatatccttcattgcttcaattagggtaataggatcaaaccaattccaaatgcctcctccccatataagtactttatcatcaatacctatattaggccatacaccctttaaaacattcttagtttttttaggagcttcatcattaaatccaaatggtacaacatcaataagttttttcatttgaacatcatctgtataagtaactggattaactctatttattgcagaaagcattcccatccagtaatctttttgcttttcactagcacatataaaaaaatctccaatggatagttgttcgagcaataagtttatatctgtttcatgataatcaacacgttcctttatacttaaaaactttctaagctccaaattttccaacgttattgggtcatatatatcaactgctataggctttttcacacgttttaaaaatggatacaacctaaaggctattccttgaacaactatagaatccacattacttgctttttgtttaagaacatctttatctccaataataatttcaaagctttcattttcaaagctcatatcagttgttttattaggtataaataaaataactgatagctttttcgacaattcccttgcaaaatttaaatatcttatacctggtcccgacattttctttgcaacattatcaggactaattaataaaacacttttcatttttatactcccattatctcctaaatattttcttaaaagccctaaaaatatttaaattcttaattctgttaagatttctatctatttttccaacatgactctcgagctcatttacatttactttaacttcactcaatgaattttgtaaatttaatatttttttatttaaagaatttatttctttcatctttttaatcattatagtatttacatcgccattttctgagccttctgaaagcataacctcttctgaaatatcgaaatcagatactagctcttcttcatccagaacaacacatttttctttatctaaaggattaaccttatatacacatttactcttaaataagagacttcctttaagctcttttccattctcaattatagatccaatatattcatttaaatcctctttttcttctccatcatttttccatatagttatgcaattagtaaaatcgtctgtatcagcttctaagataaatctaaactttctattttgagaattcattataggcttaaacttgatactaatccatgaattatctgtaagagaactagcatctatagtttgttctgcaactatactattattactgtcctcatataaataaaattttatatcatgttcattttttcttccatatgttgcaaccttcaaatcaatactcgttaaatttggatatctacatatgaatttttgacctatttttcttcctttagttaactgaccaacgtttgaagtttgcctttcttctgaaatatctacaattacatttttagttccttctatatccattttcatctttttgataggatcattacagaattttactaaaggtttcattacttttttccatctatattcttctcttacttttgctatatttgctttacatttctcgtaaaaagcttcatctgaaactaattttaaaataccatcttttaagctagccacatttccatactttacaacaacgcccaactcatccttctctataagctctgcaaaataatctccctctgttgctattataggtagtttagcccagaaataatcaagtattcttgttctaaaagaaaacctagtttcaagattatctaaatgacaactaacacctgcaaaagattccataaggaaattttgtctatcattatattcaacccaatccatgttaaagaatacatatttatcttttaattcgagtttttcagctaattttatagcattattacacatttccatctctggtactcctggattaggatgttttacacccaagaaaaataatttaatatcatctctttccttagatatttcattaattgctttaatcaaagtgattggatcaaaccaattccatattcctccaccccaaataagtactttatctgtatcctttaaatttggtattttatctttcatcatttttttattgtttacaggttcttcattactaacaccaaatggaactaaatcaataagcttatcaagtttatatgataaatcatattcatgtggatttactttattaagtgcagaaagcattcctatccagtaatccatttgcttgtcatttgcacatatgaaataatctcctaattctagctgctccaactgtatctttaaattcaaattatttgcttctactctattttttatacttttattcttatatgtctccagaatttctataacaaatggatcatatatatcaactataagtatcttttctctgcaaatatccttaagttcaggtattatttcaagtataagtccctgtagtattattatatcactttcatgcgctgctcttataagtttatctgcatttcccggctcgtattctaccatctcaatatttaactcagaagtatctatctgattttcgttaggtattgctaaaacaacctcattatatttacctaattctttggcaaactcccaatatcttattcctggtcctgccatttttttagctattggttcattagatataagcagtatttttcttctaaatttagcatctaatttttcttcaacattatatgtatttaataatctttggaatttgtccaagtacttataatcatgataatactcaactggaaatggcattaaaggattaggtattaacttctttaaatcagtatctttaacttttctattcctttgtatgtactgtcttttttcattaagtctttgtaagttatccgtaagattatttatggcaactaaagaagaaaagttcttttcatcagaatcaatttcaaaaaaactttcttcagtattagttatatcaaatacaccttcatctaactttaaatccatttgtatcctttgaatcattaaaagcaaattacatagaacaatatcaaaattatcacttgaatagtttttatatattgtatataatgcatttctttcaaacaaagttttcattttatgttgattaaatttcttagacgtaccattatgcctatgataacatatagctttagaacaaaatctaactttatatcctaaaacccataatctccaaccaagatctacatcttcatagtaagcaaaataatccttatcaaaacctccaatttcaataaaaacatcttttcttatgagcatagaaccaccacaagcaaaaagtatatctctatcttcattatacttcttattagcttcctttatatccatgccataatcatattggtagccgtatccagcaaaacttacacttccaccagcaaaatcaagtttagaaccgtcccaattgacaatcttacttcctgcacatacgtaactattatcgttacagttttcaagagtttcaaacatgtcattaagccaatttttatctaacttcatgtcattgttgattaatgctaaatactctccctctgctatctttgcagcatcatcattaggttttgcaaatccttcgtttgaatcattttttataattttaactgctggatagttttttttcaaaaactcaactgagccatcctttgagccattatctacaactatatattcaattttatcgcttggataagataaatttttaagctcactaaaacaatttttaagatgctgcaatccattataatttacgattataaaacttactttaggataactattcaaaatattttccccactttccatttttaacgattattaaagcatccaatcacaactaattttaacttttccatcctcttttatgtttccttcgtgaattgtaaaccaataatgcttatgtctaaaatcgtatatctcttgtaaattctcatccatcagtgcaattgaaaaataatatttagattttaacaaaagttcattttgtaaagaaaaactcaccatgttagtatccttcatttctgtaatcaacattccatcttgtttacaatcatggtatataagcttatatccttcttctgtaattatttcaaatgccataacagctgctttaatatcagtatttttcctaaattcaacatttacctttatattttcttcagttccaaaaaagttcctaggtctaccctctttatcagagaaatataatttagttatttctagttttttgttaccttctctatttccatctttaaattcatctgcctcatgaagcttaaaatcaaaatcagctagactttcctcgcttttttgctcttcttttttatgttcttcacttttagcatataatagcttcatgtatagtccaaccattctatcagtagatccctctattacttctccaccttttcttatgaatatgcatctatcacatatacgtcttaccgtgctcatatcatgagaaacaaataaaatagttttaccctgttccttaaatgcttgtattttattaagacactttttctgaaaatttgcgtctccaaccgctaaaacctcatcaacaagaagtatatctggatttacagttacagcaactgaaaaaccaagtctcatatacattccagaggaataatttttaactggtgtatccatgaaattttcaagctctgcaaattctacaatttcatcatatctctcatctatttcttttttactaagtcccattatagaaccatataaatatacattttctctacctgtcatatctggttgaaaaccaactccaacctcaagaagagaagatatttttcctttaaccgtaacctgaccctcattaggtcttataatgttagcaactaattttaaactagtacttttacctgttccattttctccaattattcctatagtctcaccttgaccaattttaaaagaggcatttttaagaacatgaagctgttcaacttcaagcttatttctattaagcaccttgtttaaaaatttttccttcaaggaatagcttttgtttttatataaattaaaatgttttgaaacgtttttaaattcaataactaccatattattttcactccaatttattgtaaagctgttcacctaagtaggttaatgctttaattaaacttcctctgcaaaatcattttctatttttctaaatatcctatcgcctacatataaaagcactatatcccataccaatattactactatgtaaaaaggatttggcattttgccttctaataaaacacttcttatacattctacaatcatagtcataggatttattaaaagtatatttttgtacaaaataggaatacgatccaatacatacacgattggtgtcaaataaaaccataacataaacagaacctctacaaaatgtgaaacatctctatataatacattaagagacgataaaataagagataatccaacagaaaaaactaaaagcaatagtaatattataggaagcaatagtatagtaaagctaaaaggcacttgcgatactatcatagctccaaataaaataacaagagttattaaaaaactgacaaagtttgaaaatattattgataaaggcattatctgcctaggaaaatatattttcttaattaaatttgaattagaaataatagatgtagtacttccttgaacagcgccttgaaaaaattgccatgggagaagcgctgcaagtaaagtaaccgtataattaggagtagtctggtgcattatatatttaaatgcaaaagtataaacaatcaaaagcattattggatttaaaaatgaccaaaaaaaacctaaagcagaatttctatactttaattttaattctttcattgttaagttttgtaaaagttctttatattttaatatctctttgatagaattaatcaaaggtttcacctactttttttctaatatatttttatttttatattctttttcttcaatatttcttcaagctctacatcgtctttaacagcctcagtactttctttcataaacattattttaacagtttgtataataagctttatatccaataaaatagaataattttttatatacattatgtcgtattttattttatcttctggcgttgtattatacttccctaaaacctgtgctaaacctgtaagtcctgcttttacaaaagttctatacttataatctggtatttccttttcaaatttttctacataaaatggtctttctggtcttgggccaactatgctcatatcaccttttaatatgttaaacagctgtggtatttcgtctaaccttgtagccctcataattttacctattttagttattctagaatcattttctgtaaccaaaactggtcctgagtgtttttctgcattaactatcatagatctaaattttattaatttaaacttcttaccaccatttgtaaccctttcttgaaaataaaacggacttcctccatctgtacatttaataattataggaagtattataaggaatggtgaaaatactacagtagctattatcgccacaactatatctagtaatctttttactgttttttgttctgcactaagttctaaagtatctacctttaaaataggaacgtcgtctatctgctcaaaattagctttataaaaagcaatatcagtaacagatgggactataaatatattcttattcatatacatgctttcttttataatggtgcttttagtattttcatctaagtcatccgatataagcactatatctgctttttctacgatactttttttatcttcagtataatttttaattatactgcttatactatataaatcatcatgcttaagcagtattttttttgcaatactttctccattttgacctattatcacagtattttttgttccataaatctttctttcaagcttccaccacaagcatttaaatatggataaaaggaaaaattgaaatacagaactaagaagtataactagtctcggataagaaaaccctctcaatgaaaatgtaatagccattgtaaacacaaaaagcattattactgttaaaaaaattgaatatacaatctcccagaggctcttcttaagtatatcaacaagtccaaatatatacataaacaccatatacacaataattgtaaatggtagtgatctttcaaaaggagcataattaaattttggaggtataatcctaaatctaaacctaaccatgtaagctaaatatatggaaaatgccacaataaatatttcaagaacaatagataaaattctgtagaaatttgaaatcgcattgttttttttcaagaacttcacctcttttacctaatttttaaacaaaaacaatcactaatctactataacaaattaagtatattatttcaagtgacatttaccaacgcttttcctattaagacaaattctaaactaaaatccacaaaacctaatttaactatagaaatttaatccacattataaaatctataacttaatatagggcttctaactcaatcataaatctacacactaatacttaccttataaataatgtataaatcaaatttcagtatagaaaccctatatgtgaaataaaacagtcttagtatcaaagtaccatatactaaaactctctagaaattctaactttaaatatgtttaagtctaacttcattttagtttaattatattcaatatcagaacaagaaaataaattaaatactatttactgaagcgttctaaaacttaattccacattcgcttagtttaggccatttttgatctttttctgaaaaaatcaagttttctatgtcatcgataggccattttattcctacttcagggtcattccacaatattccgccttctgatgttggatcataaaagtcagtacacttatagcaaaattcggcttcttcagataatactacaaaaccatgtgcaaagccttcaggtatatagaattgttttttattttcttcacttaaagttactcctacccatttaccataggtttttgaaccttctctaagatcaactgcaacatcaaaaacttctccctttacaactctaacaagcttaccttgagtatgttttttttgaaaatgaagtcctcttaaaactccttttctagactttgactgattatcttgaacaaaaaccatatcaagacctgcttctttaaattcctcatagttatatgtttccatgaaataacctctgttatctccaaaaacacctgtttctattatgtatactccatcgatatctgttttttcaaatttaaactttcccatttaaattcatctccaatttataattttatattccatttttacagtaaaatcagtaactatttgcttttagcaaacaattactgattcaataatcaattatttgttgttatacattttcttgtaataatcttgatatgtaccagaagtaacattttccatccactctttgttttgaagataccatttaatagttttaactattcctacctcgaacttagtttcaggataccaatcaagttcatctttaattcttgttggatcaattccatatcttctatcgtgaccttttctatcttcaacatattttattaaactttcatctactgtgctatcaacattatcatggatatattgtattacagttttaactataaatatatttgttctttcgttatgtccaccaacattgtatactcttccaagttctccttcatttagtaccatatcaattgctttacaatggtcttccacataaagccaatctcttatattcattccatcaccgtatacaggtaattcatttttattaaggcagttattaattaataatggtattaatttttctggaaactgataaggtccataattattagaacatcttgtaatattaataggcattttaaaagtatcgaaataagcctttacaatcatatctgcacttgctttacttgctgaatatggactgtgtggatttaaaggtgttgtttcagtgaaaaatccttcttttccaagtgaaccataaacttcatcagttgatatttgaagatattttttacctgctttaaaaccatctttagtctcccaattgtttttagctatattcaataaattaacagtaccaagtacgttagtttgaacaaatatttcaggcatcttgatacttctatcaacatgagattctgcagcaaaattcacaacataatctatatcataatttttaaatatgtcttcaattgcttctttatcacatatatctgcctgaacaaaaacatagtttggattttgttcacagcccttcaaattttcaagattaccagcataagttaatttatctacatttattatctttatgtcattatacttgttaagcatataatgtacaaagtttgaacctataaatccagctccacctgttaccaaataagttttcatatatttgttctctccttcacaacttataaattacaatttgttttattcttgtactaaattaaacagatatttaccatagtctgtcttatgaagtggctgtgcaagctttttaacctgctcttttgaaatataaccttttctataagctatctcttctatacaagcaacatataacccttgtctcgtttctattgcttcaacaaaattagcagcatctaaaaggcctctataagttcctgtatcaagccaagccatacctcttccaaataactctacttttaactttccgctttcaagataagcgttattaacagctgttatttctatttctcccctatcagaaggtttaacatttttagctatttcaactacattgttatcgtagaagtaaagtcctggaacagcataattagattttggattctcaggtttttcctctattgatataacattattattattatcaaactcaactacaccaaaggctctaggattgcttacatgatatccaaaaattgtagctccttcttctcttgatgcagcattttgaagtctctcagaaaatccataaccatgaaatatattatctccaagtacaagagaaactctatcgtttcctataaacttttctcctactatgaaagcatctgccaatcctcttggcttatcttgaaccgcatactgaatctctaatccaacatgacttccatctcctaaaagttctttataagcatttacgtctcttggagttgatattattaaaacttctcttattccagaaagcataagtactgataaaggataatatatcattggtttatcataaattggaagcaactgttttgatgttgccatagttataggatagagtcttgtcccagatcctccagctaaaattatacctttcattaataagtaacctccttgatttatcttaatatatgtccatatatagtattttcggcattgcagaattcattatactatataatttttttattgtctaatttaaattaaaagctttgaattgtttcctttatacctagctttaaatcgtatttaggcttccatccgcatgcattatatattttatcataagacatataactttcaaagatatctcctgctctctcacccttatgcattatttccacttcttttccataagcttcacacattagcttagctaaatcatttatggttgttttagtatttgtagaaacattatatatgtcattatctaatgaatttaaagcgagaatattagcttctgttacatcttttacatatacaaaatctcttatttgatttccgtttccatatatgcaaagaggttcaccctttgtaagtttctccgcaaaaattgaaactactccaccttctccactactatcttgtcccggtccataaacatttgaataccttaacactgtataattaatattgtaaagctttttatatacatttagatagtgttctaccgtatgctttgaaacaccataggaagatatcatattaagtggatgtttttcatctattggaagatacttaggttctccgaagatagcagcagatgctggatagattacttttcttactgcatactttctgcacatctcaagtatatttatgctacctaaaacatttaccttagcatcatacaatggatcttttacagaatctgcaacacttatttgggctgcattatgtataacaacttcaggtctttctattttaaatgcattttctatttcagcttctgatatatcatatttgtatatattgacttcatctggcaaattgctcgaatttccatgtaccatattatctataactgaaactttatgaccatgttctagtagcgatttaaccacatgtgatcctataaatccagcaccacctgttactaatatattcattttagttctccttctccatttaagaattctatttactctttttgtttaattcgtcatataaagatttaaaattaggattatcttttatagtaaataaatagttcataaatggttttttaagctcttctctctttaatgcatactcaactgtagcttgaaggaaacctaatttatctccaacatcatatcgtcttcctgagaatacataagcgtacattgcttctgttttcataagtgttttaagtgcatctgtaagttgaatttcatcacccttacctggtttagtgttatctaatatatcaaatatagatggagttattatgtatcttcctagtatagctaaatcggaaggtgcttcttcttgttttggcttttcaaccaaatcctttaccttataaactccatcttctatatgcatgccatttactataccatattttgacacctctgaattaggcaccctttgaactcctaatatggaagttttatactcattataacaatttataagttgctttaagcatggtacctttgcatttactacatcatcacctaataaaactgcaaatggttcattacctacaaaagttctagcacaattaattgcatgtccaaggcctcttggttccttctgacgtatatagtatatattagctaaattagatatatcttttacaaccttaagaagttcttttttgttatgactctcaagttcactttcaagttcaaatgatttatcaaaatgatcctctatagctcttttgtttcttcctgtaataacaagtatttcttctattcctgattgtactgcttcttcaattatatactgtattgtaggcttatcaactataggaagcatttccttaggttgtgccttagttgctggtaaaaatcttgttcctaaccccgctgctggtattatagcttttttaactctcattgataaaaaactcctctctcttgctaccacgattaaatatcacctctaaattattgttgaaacccaattaatattaacattatttatattatactacttttctagagaatttcctaattttaaaacaatttcatcctcaggatttaatttttttgctatttcatagtgtaatttagcctgatttaagtcacccttgttcatataacatataataaggttagtgcatatttctatagatttagtgacctcaaaggcctttcttaagtagcttattgcattatccatatcgcctaatgcagcataatttatgcccatctcattaaaaacttctaccatattactatccaatgacatagattcgtttagataataaattgccttttcatgattacaaagaatcctataagtaacacctatatagtataaaagcacggcatcatcttgaaactcatctaaaagctttataaatatttttagagcttctttaggattttcactcataatttctttagcattttcataatttcttatgtcttgaagcgtgtgctttaatcttaaagtatcctcattttcttctccaccattttctgtataggtatttattgcataccatgctccctcataatctttattttcattctttattatggcctcataaaaataaggctttatatatcctttaagctcttttgctttttctatgattttcagctcttcctctttaaattccggctttttttctcttatagcttcgctaatcatcatgatcttgtcgtaattttcttcatttttttctaccgtaactaatcctttgagaagtatgtacgcatcctcataattattttctttaacttcagtatatataatctcttttatatattgtgttgtagttttcaaatttttattcataagttcactatatatagcattaaacttaaagttttcatctccacccaacacataaaacataccttctacaaaaaatgataaaggtatattttcaaatttatttccttctttaactttatctataagccttttaggccttattggcgaatatatattttcctttaccttaacattaaaaatggattctacactttcttttttaagctcaagaaaaattaatttggccaccttatccttaaattcttgctgtatactcatatttccaccaccatttgaacatgaaaatggaaggcagtatacaccttccactccatttatagaataactttattatttgcaagcctggttaatgatatccataacatcattgttaaatttattcattctagcttcagaatcctctttatttgtacctgctactgctagataaactttcatcttaggctcagttccagatggccttacaacaaaccaagaaccatcttctaaaataaatctaagtacgttagacttagggagctcaatcttcttttcttcatttttaggtatatccttctctacactactcttataatcaaactttttgactatttttactcctgctacgttatctgacatattctctcttaagtaatttaaggctttttgtattttttcctgaccctctttaccttgaagctctatagatactaatttctccttatagaaaccgtatttctcatataattcattaagagcatcatcgagacttagtcctttattcttatagtacaatgccatttcacataccaatgtagctgcaacaacagcatctttatcccttacaaaagtacctgcaaggcatccatagctttcctcgaaaccaaacaaataagtatttgaattagtttcttcaaattccttaattttttctcctatatatttaaagccagttaaaacatctataagcttcatgtcataatcctctgtaatcttacgtgtcatttcagaggttactatagtttttattactgcaccattagctggtagcttaccagtatctttaagagatgagattatatagtgagttaaaagaactcctgtttgatttcccgtaagcactttatattctccactcttattcttaactaaaacacctatcctatcgcaatcaggatcagttccaaatataacatctggatctactttttttgctaactcaagagctatattaaatactgaaggctgctctgggttaggatatggagctgttgggaaattaccatctggcttttcctgttccttaaccactgttaggttttcgtagcctaattcctttaacactcttcttactggaatatttccagaaccatgaataggtgtatatattatttttaaatcttttgcgctttccttaaccatatcttttcttattgttaaatctttaaccttatctatgtaaaccttatccacttcttctccgatgatatcaagaattccatccttctcagctttctttatatctataagctttacacctgaaaaatcttctgttttttctataaaatctaaaacctcagctgcagcattatctgtaagctgatttccgtcctcgttataaaccttatatccattatattgttttggattgtgagacgcagttattactattcctgctttgcaatttaaatgtcttacagtaaaagaaagcataggtgtaggtctaagtgaatcaaataaataagtttttataccatttgcacataaaacacttgctgctctttctgcgaactctctagacattattctagaatcatgtgctatggctatagacgcattattatagtttttattaaggtaatctgcaagcccttgagtggctttgccaacagtgtatatatttattctattacttcctgctgcaatcactcctctaagtccacccgttccaaattccaggtccttataaaatctatcttctatttccttttcatcctttattgcttctaattccttcttagtttcaacatcaacatattcagaatctaaccatgctttaaatttttctttgtatgacatgtacgacaccccctaaaattttggttataaatattatactataaaacaaaggaaattaaaacttgacttactgtttaaatgtaaacttaatattaatttccatagtataattttagttttaatgaaataaattatagtattcaccataaaagacaatcttatacactataaaatcatattaaaatttaccacatttattaacctgtttttaatcatataaatttagaatttattattgcatttaaaaccatactaaactataattagtatgtttttaaacaagcataaaattacattttaatactgagaaagagggtgccatagcaggttgtataaattaaatcaaaatgaaacaccactttttaacgctttgatggaatatgtaaatagagatactattccctttcacgtaccaggacataaaaaaggtaatggaattgataaggaattcaaaaactttatcggtgagaacccttttaaaattgatgtaactgtattcaaattggtagacagcttacaccaccctacaggtcctataaaaaaggctcaagaattagctgctgatgcctacggttccaaggctgctttttattctgtaaacggaacttctggagctatacaaggtatgattctatctgtagtaggtgatggagataaaataatagtgcctagaaacgttcataaatctgtaactgccggaatcattctaagtggtgctgtacctgtatatatgcatccagaagtcgatagaagagttggaatagcccatggtgtatctccagaaactgttggagaaactcttaaaaataatcctgatgcaaaggctgtacttcttataaatcctacatattacggagtatctacagatataaaaaaaatagctgatatagttcacagctatgatatacctctcatcgttgatgaggctcatggacctcatttgagttttaatgatagacttcctgtatcagctttgaaagccggagcagatatgtgtgctcaaagtacacataaaataataggtgctcttactcaaatgtctcttctacatgtaaactcagatagaatagatatgaacagagttcagcaaataatgaatctacttcaaaccacatcaccatcctacatattgatggcttctatggattgcgctagacgacaaatagctcttcacggaaaggaactattagatggcacaatagatttatgcaattatgcaaggcgtgaaataaataaaatacctggcttctattgctttggtgaagaagttttagggaaacccggatcatatgctttcgatccaactaagcttacaattacctgcactgatttaggaataacaggttatgatcttgatatgcttttagccaatgattaccacatacaagtggagctttctgatttatataatgtacttgctgtgggttcttttggtgatacaaaagagaatattgatgctttaattaatgctttaagacaaataagcaaaagtatttcttcaactgttaaaaataagaagaattcatttatcgatattcccgatgtacccgagagaatactttcacctagagatgcatttaatggtgcaaaggaatccatgctaattaaagacagcgtaggtaaaacaagcggagaatttttaatggcttatccgccaggcatacctgtactatgtccaggagaaattataacccaggaaataattgactacgtcagcgacttaaaagctgctggtctatatgttcaaggaacagaagatcctgatgtaaattatataaaggtactaaaataaatgaaaatagaggtttgctaaatgcattcctctattttcatattaatctaattctgtcataacttctattccattttgccttaaaatctctgctgtaacaccattaccatctattatattttctttaaagtttccatcatatattttccctaaaccacaggaagggcttttagcctttaaaatcgctttactacaattaaaaattttagctaatttaagagtttcttctgcccctaaaagaaaatacttagttacatcattaccttctttatcaataactctagcccttttttctaaaacatcttttcctgttccgttaacaatctcagccggatttctaggcgttgtcattcctccaagctgttcaggacacactggaatgacttttttatctccgcacaattctttaacttttttactaaaattattaagtccactatacttgcaattcactcccaaaagacatgctgaaacaataatagtatcttctttcattttttctcctcacttcaattcaacaacagtaactcctgtaccgccttctccaaaatttccaagcctataacttttaacatgtgaattctttttaagcattgtatttatagcgtttcttaagactcctgtgcctttcccatgaattactgtaacagaccccaatcctgccatatatgcttcatctaagtatatgtccgttttatatatagcttcttcggaatcaagccctcttaaatcaatagattgagcaactgattttaaattaagccttgcttctctcttcttaacagccttttcttttttggatattgggttattattggttttccttaaatctttaagtttaacatttatcttcattataccagcttgaattccgacttctcctttactgtcctgagtagatattacaattcccttcatattaagagatggtataaatacctcctctccttccttaactgacttaagcgcctctccttgatccctctcacttatgttcaagctttcctctgcattgttaagcttttcctttaatttctgtctgctttcttgaagtctctgccttgcttcagaagaatacccaagtctctccatttccctcatgtcttttaaaatcttgtctgcttctgacttagcttcttctattattttttttgcttcacgtcttccttcatgcagtgctttctctctagtttcagtaatagatgataccttttcttcatatttttctttgaatttttctgcttgttcctttaaaaattctgcttttctcaaattttcttccgcctttacgcttcgtgtttgaaggttttgaatcaaatcctcaaactcaagcgtatccttagatataccttttcttgcttcttcaattatataatcagataacccaagtctctttgaaatctcaaaagcatttgattttccaggaattcctattaaaagcctatatgtaggtcttaaagtctctacatcaaattcaactgaagcattttcaacattttcagttttcagcgcgtatgccttaagttcactgtaatgtgttgtagcaactatctttgttccccttttcctcaaagcctcaagtatagagatagctagtgctgctccttctgtagggtcagttcccgctcccaactcatcaaataaaaccaaagaatcttcatctgcatcatcaattattctaacaatattcgtcatatgtgaagaaaaagtagaaagactttgttctatactctgctcatctccaatatcagcgtatacctctttaaaaaagcttatagttgagttttcccttgctggtatcataagaccgctcattgccataacttcaagaagtcctgtagttttaagagttacagttttacctcccgtattcggtcccgttattactaatgaagtgaattctctccccatatatatattcagaggcactaccttagctggatctattaatgggtgccttcccataactatatcaattactcctttatcatttacatgaggagctgttgcgtttatggaactagcgtacttggcttttgcaaatataaaatctaattctgttactattttttcattattcttaacagcaactatgcttttatatattagggccgataattctctaaggattctctctatctctgccttttcctttagcataagttcctttatttcattatttaaattaacaagtcccataggttctataaaaagtgtagctcccgtagaactctgatcatgaacaagtcctggtacttgagctttatattcagcttttactggaataacatatctttcccctcttatagtgtataagttctcctgaagatattttgaataactcctcatcattgcattaactttatcttttatggatgcatttttgtccttaagacttcttcttatgctataaagtgcagtactggctttgtcagatatttcttcttcacctattatcgcattaaaaatattatcctctatattttttagtggtattattccactgcatatatcttcaattattctatagctttcttcttcctctttatggcttatgtactctttaaattttctagcacatctaagcatgcttcctacctttaatagctgccctggtgccaaagagaatcccttttcagccatactgactgcctctgttacatcatatgctccctcaaatggaggtgcaccttttttcatcaacaattcaaatgcctctttagtttcttctatgtgttctttaacttcatataaactaccataaggctcaagttcatctataagcttttttgctgcactagtacttatatatttcttaattccatcctttatcttaaaatattcaagtactctaagtgatttctcgttcaccttattcaactcctcttttataacttcctcttgtaaaaccactgaattctccatcaatcttaccatttttcatccatgaaagaactcttttaacactttctctattttcatcaataaaatctattctataagaattcacgcctaaattctttatttcatctaaattgcctataagatttaatggtaatggattatatatatgacttctgcaatatttgtctgttaccacatcaaaagatactcccatcttatctttaagtacaaagtctgatttcatgcatgtaccttggcaattgcttttagaagatttacctccaaaaacacttcctataggacaatactcacttaccattgcttctattttaccatatataagcatttgggtatccatgcatttacatttattcaatgcctttatttcatttttacttaactctgtgctaatgcaaaaaccatctagatcttccttataaaactctaatgcttcgctattaaatatatttcctttatagtctcctattatattaactagacctttatatttatttattattcctgcattaaccgttactatgcctttaatgttttctatattttcatctattttattgcatatatcgttaaactcttctttaattacattaggaaccttaatataaacatccttaagttccttaagcttcaagtcacattttcttttaaataagtcaactattatgttcttaaatccctcttctttaactgcaagatactgctccttattcgaaactaaaaccatgatctctgggattttaacttctgacctcttagaaatctttattccttcaaactttaaattagcttctcttttatagcttttctgaatactattttgaaatttttctagaacttctctccttattgaattcaaagcagatatcggtatatatccttcatcaaagcaggtaaactctatgtttctgacctcaaaaggagtacctcctgttttccttaaatgttcctctactttttctctctttacaggacttttttcagccttgcaaaccatatcccctaaaacttgtatactaatagccctatttttttcatttgcccctaaatcatttactcttgaaaaacttgcagtaatcttaaatggctctccgattttaaattcaatttctaaatctaaatatacttttctcttaaaatcctttttataactttcctcaatttcacgagtaagctttaaatcaagagtcttgtatatataatctccagacttgtaaaagcgaggaaatattttcaccttttctcctggcttagcctctttaacttcaaccccatcaagaagtatctttgacacaacagtacccttgacatcatttctaactccatcctttaagtttaaactttctttaagaactatacttccatcacttattaccttccctataaaaacccctgtatttttagggaatttataagccatcatatcttttcctgtattgcccaaaagatatgctcttgaaaaaccctctctattaaaaagctttaaaagctttgctttctcttctttatagtctccattaagcttattatcaatggcttttctatatgatgaaacaactcctcctgcatattcaggctttttcattcttccctctatctttaaggaagaagttccggtatcaatgagcctatctaaaatatccacagtacacatatccttggtacttagaaaatatccttttttactttccaaactgcttttatcaataagtgtataactttgtctacatggttgagcacatcttcctctattaccacttctaccacctattatagaactcataagacactgtccagaataacatacacataatgcaccatgaacaaaaacctctgtttctatattaagttctttagatatgtattcaatttcccttaaggacaactccctcgaaagcacaattcttttaaagcctctttctttataatacacagctcctaatgcattgtgaattgtcatctgagttgatgcatgtatttcaaaatcaggaacgtatcttttaataagttgcaatatagcagtatcttgaactataagtgcatctactcctattttataaagaaattctatatatctaataacttcttttatctcatcttgttttataagcgtatttactgttacgtatagccttactccataatcgtgacaataatcaactgctttttccataatttcatcattaaaattttcagcataagctctagctgaaaacctacttccacctacataaactgcatcagcaccgttttgaacagctgcatatatgctctcaatactgcctgctggtgctagcaattcaaccttattcataagtacctccaaaattattaaattttatataactatgatattatccactaatcctcttactatgtatggtcctataactattatacataaagtatctattattacaaataaaagttataaggtaaattttattgcaaaataataaggagggtttcccctccatttacttatattaatttttaaatactaaaagttaatctttatctaattctccaatctcttcatttaagtattgatgtgaacaattttcatcctctggtaaagcaaaatcctctttttgaggtggatcaaatatatcaaatggaaattcaagattattaaagtattcacatggatcttcagatatttcttcacatacgtctggtttacagaatcctgttgatggaacaataagatttaccaatctgaacaatttaattatagtaaataatcctatagtaacattaacggcattaggtacaggagctgcttctccactacttacaactggaatagtatagcttaaggtagcatcaagaggatacccatttgcttctactaaaacaaaaggagctgcttgtaagttactaaaactgctgttaactaaatctgtaaatatattaaccgtcgctccaatagagccgaacaaagtaacctttttgttgaatatactacttgctggcacagttgctataacagttccaacactattcctaaactgtaatgtatacaaaaacgtgaatttaagctcaatatcataataccctcttctgaaaggattctcagctttatttactaatattatacttcctatagaaaaactatttggcactataactactgctgctgcatcgtctggtgggttaattggctgacctgttgcattatcatatgctaatttctcaatgcaatcctgctgcctacattgatcataaaccttattagctataatgcattcttttttagtccttccattggtatcgctaatagccattgtaatacctccctgtattgaattacaaacatgctcacaacatgacaaatatttatcttacatttatataatatgaatatcataaaaaattgtgcttattttttatctacatattcgtttaaatactttttctcaagggctaatatcttctctctatccatattctttatctttcttataggcgaacctacatatagtgagtacggttcagttatagtattggcctttattaaactgttggctccaacatacgtaccctcacttaaaacagcccctggaagcactacactattagctcctacaatagaaaacttttttaatataacaggggctgaatacacattcttaaattcatcaggaacagtagaattagttaaatatgaatttgtgtaatcatctgtacttgtcagtactttggtccctgttgcaagagcagagaaattttccattataagttcttcatttcctgttatacttacaaaactggctatatgaatattatttcctatttttactctctttttagcgtttataaaaacaaaatcatctattataacattgtcccctatctctacattttcaggaaatgttattttagcttttccatatataattacattctttcctatgcttttaaaattcataattagccatctccttaatatcacataaaacttttaagcagatttaccctatgcatcatttgctgatcaatattaaatatatttaaaaacttaattcttcccctctgggacaattcatataatttaataggattatttttgtagtatattatctttgatactgtttttccaatatctttatctaaaataataatatcaattccatctataaaacttctattaagttttaaaaaatccgtacaaaatacagctgtaccactcataccggcctcaactgcacaacctgttggaaatccatcaaactctccagtacccctaaaaaatggaactgtaggagctataacaatatccatatgagagtagaactcaggaaaaaattctttttgtctatatccatagaaaattatcctatcttttatatctgatacatcaatatcactacttgaaaaaccacctactacgtgaaacctaaactgatctgatattttagaaagccttttacatatctctataaaactatcatatcctttatctatccctttgcttgtgtatttaccggctacaaaacatatatcaaatgtctgtttatcttgaggataacatgattttattttgtaattttgaagaaaatattttgaatcatctacatatccataaatatactcaattttatctgtagttgttatattattatctataagatatttatacgatatttcttgagttacaatcacttttttgaaaaacttagaggagcatacctttataaggttacttttacaatttaagtcacttagcgaaaatccacctcctggataaagtgtaaatacaaatggtgtagcttccctctcgaaatacttcaaaaaataggaagcattgcctgcaaaaacagtataaaatagagagcaattaaattgaatgttatccgtaaaaaatttaattctgcccttaaattggggataaattttagcatactgattgtagaacgtagtataactttcataaggcatgctcgaatatatataacaattagggaacactgtcatataataattaaattccgctactctgaaacctgttaaaggattaggaaaatagtcatctaaaataattaatttattatccattttcgttcaccattaccaatctgcggagcgcttgtaaaacttcttgcttattctgagaaaattcttttctatacttatacttaaaaaaactatcgtattgatctatacattttgatatcatttgcaaattttccattttagactttccactccacaatccggattttaaaattctatgtgaagtcatataattaggtatatatccaattaatccaaattgagctactgccatgttaaacatccaatcataaacgaccatatcataaatagattctctcagcttccttatgctgctttttctatacatacagcaagaaaaattctgtataaaattacttcttacaagttcccttgcactaaatttttttcttatatcattaaatggatatatgaggttattgattttttcatcaccataatctaagactattttattaaaaactaaagaacaatctctattgctttcaaggaaactaacttgcctcttaagctttgatttttgtatccagtaatcatctccttcaagcacagctatatattcacctttacagtttttaaacccatttttatagtttaaggttataccgaggtttttataatttcttataagatttaacttactgcccagtttacttttatattcttgaagtatattaaaagttctatcgctcgaacagtcatcacagactactatctcataattgaaattaaccttttgacttaagacactttcaagtgcttttttaatatatttttcttggttataacacactataagcacgctcactttataatccatatacatccaccttttttcctatgacttatttaggtttttcatactcttttttaaaactcagtaaaaatcttttataaaattcactatcaattatcttttttctgtatccataatcgtttaaatccttccattcaagtagaaaccttcctgaaacctccggtctattggtattttgcccttcatgaattctaaagtaacttaacgtatcagcaatatacacacaataacccttagaaagtaattcaaaccatgttgcagcatctattaacgaatagtattgctttccattaagtgatccaaaatttttaacgtcactctttttaaacaaaacagtagttggttcccctataaagtttccaaggttaaacattagctttgcaataattctcccactaacaggtctattaagataacgtattcttttagtcgcatttatatctggaagtatattatcatttttatctattactgatctatgagaagtaaccaaggttattttcttataattctgaaaatacctaatcattctcattattttacttttatgaaacatatcatcatcattcaaataattaatatattcaccttttgaaagctcatagcatttctttacattatttaatccaaaattcccgagaggaccgttattaaaatagtatcttatattcttataccttttcatatagctttctacaactgttttactatcataattagtactatcatcacatattacaatttcgatattcttataggtttgatttacagcacttctcagtgatttttctaataacataggtctattaaaagtaggtataagtatacttacaagtggattatctctcattttaaaatcaccttttcatccttaaacttattaacgttaaattagtaaaatctataaaatttataaattatattattcatcccttaatttatatgttattatgattattgtaattatgtgctaataatatttaaaccagtttatcataggattttccccactttttttcaagcttactcttgtttacttcaagaagttttaagtactgggtatttttaaaagacacactgccataatgatgaacaaatgtatctttacaaagcattagtctaaatccaatctttcgcatcctaatacaataatcatcatcttcaaaatttcctggagtaaatctttcatcaaataaacctactttccttattacatttctttttataagaaaacaaaaacctattaatcttttgacttcagtccacttttttttatttgaaatattatattttttagaaaacctatgcatatcttctattgaatcatatcttacatttattttttgaccattagagcagttatttgaaataggtcccactgcacctatttcataactgctatataggcaatttctaagattatttagccaattatgtgttaccacaacatcattatttaataaaagcacttcacttccacatgcaactttaattcccatattacagcctctaggaaatcctacatttacattattgtatattttttttatagccttctgtttactaagccaatttcttgttccatcgtttgaattgttatccaccacaattatttcgtaagcttctttttctgtatatttttttatactttctatacaccttctagaatatctaaggttattacaggttaatattattatacttgtcttcatattaatccccctgcgaatttctgtgtatatagattgctccttcactaatttatcaattgtttgtatacatttttctttagcaacttaaaattagagttatatttaaacccaaaaaaagcattataaacatctataagttttattgtaagtgcaagtctattttttacactgtttcccatccaagttcctctagaatgaattctatacacagaacatatttgaggtaaatacgctataggtttttgttctgctattaccatattaaacatccaatcatatacaagcatatcatacagcgattcttttactttatctacacaactttttctatacatacatgttgaaaaattacctataacattacctcgtgtaagttgctcaattgttatggtttcatatgaagtatttgatctccacgcttgtgttgctttagaattatttatagcattataaattatatatctattaaataccgcagaaaagttcttgtgcctatctaaaaaattactttgaatttgaagcttctgcttattattccaataatcatcaccttcaagtaccgctatatattcacctctacattttttgaaaccttccttataattcttagttatacctaagttcttattattggaataaacttttattatgtctgtgtacttttcagcatatttacctgctatcttaattgtagaatcactagaacaatcatccataactattatttcatatttaaattttgttttttgctcaagtgcactttctatagctttttttataaaccttgcctgattataagttataattaatacgcttactttaatttcatcattcatcatatcacctttttatttataagtaattttcttactgccattaaaacaatacacagtaaaatcgcaatacttattatgataccaatgctgtttatgagatttagataacttataccttgtgtaggagttactcaaattagaatacaaatcccatgtaagatgcttcaccttattttttttagtttttacccatatccttcctaaaacatcataacaatacttaagcatttctgaatctttaaatttaagtttatttcttttcatgtaacgtaaaaagcctttaaattccttagacctcatcataagaagctgattgcctgttgcacattcttcgcagtcatttaatattcttctgctcttaggaatccaatttttagcttctctaaaatgctgtattggtaagttattagtcttaagatttatgccgcatgcaaaaacttctttacgcctttttagaatatctctttcttcataaaaccagtcattagaattaccttgtaagtctccatctgttacaataattttgtcacatttatgaatattaattattcttgaatcaaaaaattcttctaccgcattattacttatattctcatcgaattcaacatacatataaatttgttttttcttaacaagttccattaaataaggctttattttttctgtatttacacttttattttctagaactataatatctataaatctattagcttttaataaaaattgtattgatttttctattatttttttatcgtaatatacaagcactatacatggaattttaatattattcacatttatcacctaaattcaaaacactatttactatatttattattttattttgttctgttatatttaaagagtcataaagaggtaaacacaatatcctttttgaaatatcttgtgccacaggaacttttctgtaatcttttatataagataaatcatttaagcatggataaaaatatcttcttgggcgtacaccttcatttataagctctttcataactcttttaaggatattctcatttttaaaaattatagggaaataaccataattgcaagtacagtctctactacgactttgaaagtatatatcgccttttatatagttcatatagttctcatacactttttttcttctttcaaatatcttatctatatcatctaaaaggcagagacccatggctgcttcaaattcattcatttttgcatttattcccaaatcttttatactatccgcgctctctataccaaaattccttgataaaatagctttctcatagagcttatcatcgtttattacaagagctcctccctctatggtatgaaatattttagttgcatgaaaacttattattgatatatctccataggacaatatatttttatctttatatttaaccccgaaagtatgagccgcatcataaattacttttaaattatacctcttggctaacttatctatttcctcaatgttacaactatttccaaaaacatgaactggcactatagctgacgtcctttttgtaatatttttttctataagctttgtatctatattaaggcttttcttatctatatcaacaaatactggattaagtccttcccaaacttgactgcttgttgttgccacaaaggaaaacggtgttgttactatatccttttttaaatttaaaattttatatgcaatttgaagagctaatgttccattttgaacaagtactatatttttaaccccaagatattcttcaagactcttttttaattttcttaccatctcaccattattagttacaattcctgaattaaatatctttctaacataatcactatacttatcaaatggagggaggtaagttttcgttacatttatcatattatcctccttatataatctaaaaaattaaattgttacaattggcaaataatttttatacttcccaactttttttgtaaccttcattaaatcttcagaacttattttccatgtatggtcgtttaaactcctatgcttaaagtacacatagttgaatctgttacaagaatatatttttataccttgtttacaacaatcctctataaaacatgcgtcttcagccaaacttatatttctgaatctcaccttattaaaaacgcttttcttaattaaaagtgtagaacctgcaacattaggtatatatttttcatttccttctggatacattatttcaagcctgccgtatccctcataatagacaaagaaagatgcctttccaacaatatccgagtttgtatatataagagatgtaatttcatcacaaatataattttctccataatagtcatcatcatccattttgaatatataattatacttagaaatgtctaccccatagttcaaacatttacctagcgtaacattctcaggtttctttattattcttacattcgaaaatctttcagcaacttttttatatttagatatatttaaattcattttatttaatataattatcatttcttttattgggtagttaattctactataattagaaaatatattttcaatatacttcattttattagtacaaactattatggatactcccggcttatggaaatatctatatctgtttctattcttgagcaatattttcttttctctttctagattaagtttcataataccttttcaaacttattcttacttacttaattattatatgtgtttttaaaactacgggttacatataatgaatttccgcaataataaaataagagatttcactttttaagtaaaatctcttataccttaaatataatttagaaactataactgaatctttttataggttttttttgcaccatttctttctattttatatataccttttatctttatgctactattttttatctcagttatcactgcatctacattctcttcattaaatctaacactgtgcgtacatgaagtagatattgaacaaggtgtctgtattatcttggtttttatctttttatcatttaatttactatatatatatatagcatgattttgagatttaaaaaccactaaatattcattttgtagatcttttgttttcaacatatccaccccttcatcagaggagttttctaatccaaacccactcttttattttacgggcgttgtctatactccctattacattaatatgcctttgctcaattaatgtatataaatttttcacattagatttattaagataattcactagtgtatagtatacactctgagtatagtctgctttatctaatttgtttttatcaaagtacaattttgcagaagccttgtcttcccttatagcaatttgtgcataaaactttcctcttttagttgtaaatttgtaaagtttattcatagccgctttttcttcaaacccttcaggatacattctaaagacagctgtatatctactgctaatatggtgtctcgatgacttttcatattcactaaaattataatttcttttatcaatattaattttcaaatagtaatttctataaagctcattatatccaatgtttttaaagccgttaactgctgtatcggcaaccactctgtctatcctacgtgcaccaaactttctagccacgtcagctatgcccttttctataatttgatatgcttttttataacttggatttactttaatataatgtacaaaaacatacttagcatctacagtgcctaaattttcaaaactaactatactagatgcaagctctatagcatcctcatacattcttaatattattgttttatcacttaatattatgtttataagacttgaacttatattgtccatactttttagatacttttcctttttatcaacttcctgaactatgtcaactgaaaatgactcttttctatgagtctctatagccttatcaatattatcatccacgctagataaaataatatgattctctttaataaattcattcaacttctttcctaaatcataatattctactttcccatcctctacgaattttctatagaattttaaagctttaattatagtttcttggtagcttactccttttttttcagaataaccttttacccatttttcaagctcatccatatttccacctcataaaatcactttcatattttccctttatttatttcaactacagcttctattaatttgtctatgtcctctatggtgttaaaatatccaggactaacccttacagtacccctatttttagttccaataatttcatgaactaatggagcgcaatgatatccatttctaacacaaataccttttacatttaaaattgcagctacatctgaactgtcaattccatctatattaaacgaaactacagcacctctattttgtaattcatgtccataaatcttaacataatctttatttttcaaattccttataagatattcagttagttccatctcatgcttctctatattttttaagccgatactatttataaattttattccagcatttaatccagaaatccctggagtatttagagttccactttcgaacctgtctggcaaaaattcaggctgatcaactgaaaatgaattgcttcctgtacctccactcttaaactctgtaagttttattccttctcttataaaaagtcctcctgttccttgtggccccataagccccttgtgccctggaaatgctaacatatctatatggcttttttcaacgtcaatatttagaacaccagcactttgagcagcatcaaccataaagcatactccattcttatgtgctatttctcctatttcatctatattctgaatagttcctgttacatttgatacatgatttactacaattagttttgtatcacttctaatcaacttttcgatttctttaggacttataaacccatattgatctgctcttactatactgcactctactccctttttcttcaaatggcttataggtcttaatactgaattatgttccatgcatgtggttataacatgattttttctcttaagtaagccttttattcctatatttagtgcttctgtcgcactacaagtaaatatcacattaaacaaatctgaaatattaaataatttagctattatttccctagtttctgtcaccttatgagatgcctttattgccatatcataagaacctcttcccggattagcggcataatttttcatgcaatccaaaacctcattataaacctcatctggtttaggaaatgttgttgctgcattatcaagatatatcataaatcaatctcctaaaatattacttacaatattttatgactctttatatgattatattataaaaagtaaaaatcccattcattactgaatgagatttttactttttatgctttgttttagtattgttatttagtacctcaactacttcttttttcgctttagctaaatgaatttgattctctagaaatttattttctaaatctattattttgtacttcaatgtatgtatattaaatcttaattctttattttccttcttgtacttgtcctcgttttgcaaatgccttttactttcttctttaacctgaagattttcatttataagattattaatttgactcttcaaaacagagatttcatcacttgaattattattttttaattcttctattttctttaagagttcctcatttctgatatttgcattttctatctcagatttaagcttcctctcaacttcctcaaaggacgctatttttttctccatgagttctatactatctgccaacttttcattttcgctgccaagcttaaacatatcatcagtaacattaatagcagttaatatagatgcatcagatgtactgagcctttcattattttccaagatattcttaattttcttatccacataatttccaatggttctaaggtactcctctttttcttctccctttagattatattccatgccgtttattgttatggtaattatattcatataaacaccctcttagttttatgtgtacattgtctatttgttctttatatgatatttgaccaatatactttagatatattttaacacatataaggtttctaactcaacctcaaagttatatcacttataattattaaattaagatatctttgattttataattagaaaccccatatgataaattttaaaagctatagaataattatctaagctctgcacctaaaacgtgctcaagagtctttataaccttattttgaatcttttctacatctttatctgttagtgttttgttttcatccctataggtaagtgcatatgacacgctctttttaccttgaggaacctgttttcccttataaacatcaaataagtttaaggactccagtatagttcctccttgtctttttataacattctcaatttcttggacaagtatatcctcatcaactaatactgaaatatccctcgttaccgttgggaattttggaagagctttatactttctacttaatgatacattttcaagtaataaatctaaatctatttctgctacatagcatctttcttccacttcatagttttcgcatacatcaggatgaacttctcctaaagttcctaaaacagtattttttatttttataactgctgtttttcctggatgaaaagtaggattttcgctttcacgagcatatgaaatcttgttgactcctaaaatctccactaaattctccacaacaccctttaaatcaaaatagtctacatttccatacatacctattgttataacatttctctctttaggaatctctccttcattttctgaaggaatatatacttttccaatttcaaataattttgcaagctcattgttatgagaataatttcttgcaagagattccatcatggaatgaagagttgtagttctcataacactaaaatcttcacccaaaggatttcttatcttaacaacatttctaagttcactatcttcaggaaccagtattttatcaaatattttaggacttacaaatgagtagtttatagactcattcaagccactagaaattaaaatgtcagtaactacatcttttatttgctgaattttgctttttccagttcttatactttgagatttgactgtagttgaaggaaccttgttatatccataaattctggcaacctcttccgctacatcttcttttatatttatatcacatctaaaagttggagaaaaaacttctaatttgtctccctttatttctgtagttaattctaacctatcaagatactccttcatttcctccttacttattttaattccaaggaaattgtttatccaattgtaatcaacctctactatgttaggttcacttttaacaggatatatatcaattacgccttctacaatttctccagcatttaattcctgaataagcgtacaagctctattaagtgcgatctcagcgagattaggatccaaatctttttcatatcttcctgaagcttctgttcttaaggctaacttttgtgaggagactcttatattggttccatcaaaattagcagattcgaatattatctcatgagtgttctctgcaacttctgaatcaagtccacccattattcctgctatagcacaattcttatctccatcttttatcataagaacatttgaatccaagcttctctcttcagaatcaagagtagtaaatttttctccatcctttgctctttctataactattttatttgaagttatcatttttttatcaaaagcatgcattggctgacctacttcaagcataacaaaatttgttatatcaactatattatttattggtctcacacctgcaagcatcaatctttcttgcatccatgcaggagagtcttctattttaacatttttaattactctagccatgtatcttctacataacttatctttaacttcaacctctagctcttcctttatatttcttccctttgtttcagaaaaatctatctttacatttctatactttgtattaattgtagctgctgtttctctagctattccaattacacttaagcagtccggtctatttgatgttatttcaaaatctataacaggattatcaagtcctaaaacttcctttatatcttttcctataggagtattctcatctaatatcataagtccatgaacgtgttcttcatctgctatcccaagttcttctttagcgcacatcatgccattggaaactactcctctaagcttacctttttttattttcacgcccccaggaagagtcgaaccatgaagtgcaactggaacaatatcattttctttcatattttgagctccagtcactatctgaataggctcatttttgccaacatccacactgcaaatcacaagtttttctgcatcaggatgaggatctatctttaatatttttccagtaaccacatttgttatttcgtccccactcgttattatttcctcaaccttagaacctgaaagagtaagtctatctccaagttctttagcatttatatcaaaatcaacataatcctttaaccatttaacaggtactttcatttttatcctcctaacaaaatactaaaattgttttaaaaatctcatatcactttcgtacagctgtcttatatcatctattccatagttaagcataactattctatcaagtcccataccgaaagcaaatccactataaacttcaggatctataccacagtttcttaaaacattgggatgaaccataccacaaccccaaagttctatccaaccttcccctttacaaactctgcagccttctcctccacatgcaaaacacgttacatctgactctgctgaaggttctgtgaaaggaaaatggtgtggtctaaacttcatttttacattttctccaaacattttcttagcaaaggtttcaagtgtccccttcaaatcagcaaaagttattcccttatccacaacaaggccttcaacttgataaaatataggtgaatgtgttgcatctgctgcatctgatctatacacttttcctggagaaatcatttttataggaggcttttgattaagcatagttctaacttgaactggtgaagtttgagttcttaataccacattatcatttatgtaaaaggtatcctgttctcctctcgccggatgatttttaggtatattgagcatttcaaaattgtacttatcatactcaacctcaggtccttcctcgattacaaaacccatatctctaaatatattttcaactttatttaatgttaagtaggttggatgtctgtgacctatagtttgcctttttccaggcatagagatatctataatctcactctcaagtctagtctttttttctgcatcctttattttttcactagcttctacaataaggctttcaagcttacttctaacttcattagcaagttttcctatgattggtctttcctctgaagatagagcccccatacctcttaatatttgagtaagctcacctttttttccaagatattttactcttatttcttcaatattctttttgtctactgcactttttaattcatttaaggctttctcttttatagcttcaagtttctctttcattgaatttgtaaactcctttccatttatataaaataaaaaccgcccctaataaaagggacggagaatttccgcggtaccacccaaattggataacccactcaaaattttaacgatatgtaaccgccatttactaatttgtaagactcacatttcgcaaatggaactccagagtgaacttcaatataactcaaacttaaaaaggcttccagccattaaccttttctctcttaaagtctcattatatttactctctctttcaatgtttttattattaatattgacttttattataacatataaaaatcttttttcaatactttatgaaaatttttaataaaacctacatcattttcctaacatattcaaacatcataatagcagccgccactccaacattaagggattccacgtttcctggcataggtattttaaccttagtgtcacttatatctactattttatcacttattccatttccttcatttccaactgcaataataagtttttcattaagtgaaacatcataaaaattatgttctgtatcaagtgagcttgcaataatcttaaatccgtttttcttaagttcctttatctttgaaaaattatcatcctcaaatattatgggtattttaaatatagatcccatggtagccctaagtgttttgttgttataaatatcaactgttccctttgtaattataactcctaaagctcctgctgcatttgcagttcttattattgttcccatattcccaggatcttgaaccttatctacaagcatataaaatcctttagttaatttccaagctacttccttatattgcactactgccactataccttgaggtgtttgtgtattacatatatctttcagtatgctttcagtaaccttaatcacctgaaattccttttttattagctctttaagctcttttaaaataaatttatcgtagtttttctcagaaacaaacaaatattgtattttaaaatcagattcaagagcttctctcacaaaccttaagccctctacaataaaacttttctttaaatctctatgctttttttcattcaacttctttacttcttttataatagagttttccttactttttattactgtatccaatttatcttccttcttttttataaaattaatgcagccacaagtggctgcattaaataagtactatgcgttaatttgtttttttgctacttcaactaattctgagaacgctttaggatcatttatagcaatttcagaaagcatctttctattcatatcaattcctgctaattttattccatttataaatttagaatatgaaagaccatttattcttgttgctgcgtttattcttgctatccaaagctttctaaaatctctttttcttaatcttcttccaacataagcatttctaagtgctcttattactgattcatttgctgttttaaataacttactttttccaccataataacctttagcaagttttaaaacctttctatgatttttacgtgcatttactgctctttttactctagccatactaaattaacctccttcaacctttcctattataggtatggtaacaatgttttcattgttttttcttgtgtctctgaaacgtatccaccttttcttaggtttcttttagtttttgtacttttcttagtaagtatatggcttctaaaagctttacctctttttaactttccagttccagtagctttaaatcttttagctgctgcttttttagttttcatttttggcatgtgtacttcctcctatactattaagcttttttaggtgctaatatcattatcatatttttaccttctaattttgctggtttttcaataacgccaacatcatttatcttttcaaaaaaattgtcaagtatcttcctacctttaaatgcgtagtcagtttgtcttcctctaaatcttactgcaaccttaactttatcaccggctattaagaatttacgtgcattatttgattttatttgaacatcatgctcttcaatagatgcacttaatcttacttccttaacatttacaatcttttggtttttcttattttctttttccttcttagtttgctcatatacaaacttaccaaaatccattatcttacaaaccggtggaacagcattaggtgacatagcaaccaaatcaagttccttctcttcagccaattttaaagcttcacttgtaggaattactcctagctgagaaccatcatcacctattactctaacttctttttgtcttatttcctcatttacaataaaatttttattcttacttatgattttcacctccgaaaactcaacaaatatacatatatttataataaaaaaagacggttattcaccgtctcaaatatacatagcaaaataagctgcatatctttaaccttactagctttgctgtaaggtgagaaacggcaagtttcttcttcaatacttaataaattataccacctactagctactttgtcaacaattagattgaacttattttttccttaacttctgcatttattctaaatatgaaatcctcaatattcatagatcccaaatctccttcttttctgcttcttactgagattataccttcttttatttccttatcccctattacaatcatgtaaggaacttttttaagttgagcctctcttatcttatatcctatcttttcatttctaacatctttttcaactcttattcccgcttcttttaatttttcacttatagcatcaacatattctacttgactgtcagttatattcattactttaacttgaactggtgcaagccaagttggaaaagcacctgcatagtgttctattaaaatacctatgaatctctctatacttccaaaaacaaccctatgaaccataacaggtctatgtttttctccatctgctccaatatagttgatatcaaatctttcaggcatttggaaatcgagctgtattgttccgcactgccatgttctacctatacaatctttaagatggaaatctattttaggtccgtagaacgctccgtctccttcattaactatatactccaagtttgcagcattaagtgcatttataagtccatttgtagctgcttcccaatcttcgtcacttcccattgaatcttctggtcttgtagataattcaacataatattcaaacccaaatactttatagaaagaatctataagctttattactccaagtatctcttctgttatttgttctttagtcataaatatatgagcatcatcttgattaaaacatcttactctcataagtccatgaagtgctcccgacttttcatgtctgtgaacaagtcctatctctgcaagctttataggaagttctctatatgaatgtatattatccttataaacaagaattgatcctgggcaattcataggctttatagcgtaatcagcttcatctatcttggtaaaatacatattttctttataatgatcccagtggcctgactgatgccataaagcttcatttaatattataggtgtacttatctcatcataaccagctttatcatgaacctctctccaataattaagtaaaagattttttagtaccattccctttggatgaaagaacggaaaaccaggcccctcttcatgcatagtaaataagtctaattcttttcctatttttctatgatccctcttcttagcttcttcaagcatatttatatagtcatcaagatctgcttttttagtaaatgcagttccatatattctttggagcattttatttttttcatttcctctccaataagcacctgctacagacataagttttataactttgacctttgcagttgattcaacatgaggtcctgcacataaatcaacaaattccccctgcttatagaatgaaattacagcatcttctggaagatcttttataagttctaccttataaggttcttttttctcttccatgtattctatagctttttctctaggcaactcaaatctttcaagcttaagattttcttttattattttgttcatttccttttctatcttagcaaacatctcttctgtaaatgaaaaatctgcatcgatatcataataaaatcccgaatcaattgcaggtcctatagctagcttcgcttcaggataaagtctttttatagcttgagccaatatatgtgaagctgtatgtcttaatgtccattttccatcctcatcatcaaaagtaagtatttcaagattgcaatctttatcaatgttggtcattaattctgctctctttccattgattttagcagaaatagccttcttgtaaagccctggacttattgcttttgcaacatcgcctggagttgttgtattttcaaactccataacttttccatctttaagtgttactttaatcatattaattcctcctataaaaattatttatcaaaaaaaataaaactcctcccatacaagggacgagttaccgtgtttccacccaaattaaaagaagaaatctttccttcctttcactcaaatcaataacgcagatatgcggaaatgcctactataattcaacactcagctcaaaggtggttttcaacaatacacgtttgggaaaatttcagctaataattccctctctttaaaacagtaatttgcttactcttccttttcaaagcctttatttaagtaaaattatattccaatagaaataataagtcaatacaaaattaatttttacaattatattattaatatatgtttattctttatctacactctatgttctacccatagtaatttcactgcaatatgttactctgttttcaaagacattttgtatagtatttaaaatttccttattcaagaacttatcaatatcatggataactatcttttctggacatgcagttatcaaaccacttattaatatatcatcttcatttatatcacttctaaacttagcgccagaaaattctaccattactttatcagttatatcattattatttatatctgtaagtctatagtctccattttctatcacataaatattaacgatctcaagcttgctttcttgcatttcaacaaaatacttaaggagttttataaactcatcatactctttttcaatcatatatctctctattaccttatctattataacttttaaactttcaactatatcttttgctctaaatgttataaaaccagttacatttatttcatcatattcattaatacacttgtttattttatctaaaattttattctttttatttatataaaatatctcctcatcatttataatattatcttttaaaatttcgttaatacaaatttcccttacctcgctcatttcatcaatgtctagaaaaaaatatgaatcttctaatatatcatttaaacccatcatacagaaatctatagccataatatcgtataatactttagcaaaacacctatcaaattttttcttaacagtatgatcatattcataattgttacacataatttttataaaatgactgtcttcttccatactttcacataaaccaatatttatattttcttcttttaagttatcttttatttcctctatactgcttatgacataattaactttatccttaaccactatagttttaataagcattttaccaatcctttctaattggatgtaatgcaaattcatatttatttctaaaaatataaatccaatcttagttagtatgcatctaaaaaattaactatatgcatttaatttaataaaaagatataatagattatattaatatattatttattgtgaggtgtttttttgaaaactgttattgtagataatagaataaatgaacttgaaagaaataatttgaaaaaactagatttgaatttaatttttgctcctacctgtaatgatatttctgaggctatttcatctcatcctgatgaaattatttgtaaggtatctgattctttgcttattgcttataaaaatctgcctaaagaattcatttcatctcttgagtgtttaaatatcaaagtactacaatcttttaacacctttaaaaaagaatatccatatgatgtagcactaaatggtgtagttttaaaaaatttctttatacataatatcaaacatacagacccaatacttcataatcatatttctaaaaaaactattataaatgtaaagcaaggttatacaaaatgttcaacagctgtgataagcgattctgcaattattacaagtgatataggtattgcacgtgcttcttcggcctttaatttggatgtcctacttcttcctcctggtgatattcttcttcctggttttgattacggttttataggcggtacttgcggtctaattggcaaaaatcttcttgccttttatggatctcttgagaaatataaatttaaaaataaggttttgaattttttaaacaaacataatataacaccaatatatcttagtaatgaaaaacttgtagatagaggaagtatcatttgtattaatcattaatattatataaaataagactgcctcaattgaatttttcaatcgaggcagtctgtgtgaatcaatttaattaaaacttactatttaaggctgctttcatattcttgaatcattcttttaaccatctgtccgcctacagatccattttctcttgaagtaagatctccattatatccttgttttaaatttactcctacttccttagctgcttccatcttgaacttatctaatgctcctcttgcttctggtactaatgtttggttatttcttcttgacataatcaactacctcctttaaatttaacttgtattgaatttacgttataagtttgtgcttttttaagatatttaatctattaaattaaatgaaatatgcccaatacttgtatagtagcttacctttttagctttaagttactttatagaatataatctatttttttcaatattacatgttgataacatctgttatgtttgttataatactcatataattatatattctaggaggtattttaatggaaaacgaaaacgactcaaaagtaggagctggaatcataactatatctgttcttcattttataggagcagcttttactcttattggttcccttatattattaggtgccaaggacaatatcaacaatatattagctcaaagtggccagtctgccagtactgtaactaatgcatctatagctatatcactagttcttgttatagttcttgttataggtataattttaattcttaacaaaaaagctttgggagtatatttatatttcttatctgaaatagtatctataatttataatattgtacattcaggtttttcttttatgatggtattgtcccttattcttcctattcttatggcagtatttatataccagaaaaaaagcttatatggatttggaaataaatcagcttcataaatattacaaaaaagatgaattatatatataattcatctttttatactatataataaaaaattcttcataaatattaaacttttatttaatattgtgaaggattttctctttttttgtagaagtaattagtagtatttttgtctaaaaatatatttgctgtgctttaataagacaaacatatacttaaggggggagattaaaacgaaaaaacttttcagtacaacattcattgtcggcttattttttatgcttttaggatttagcacaaatgtattagccgacacaacaactgcagttcctgatattacatatcagtcacaaattcaaaacataggctggcaggatattaaaacagcaggaaatacttcaggaacagttggacaaagtctaagggttgaagcatttaaaataaaccttataaatgcaccagctggagccaaaataaaatatagtgctcatgttgaaaacatagggtggatgaatccagtctatagtcctgatttaataggaaccgttggcaaaggtcttagaatggaagctttcaaaatttcattagagaatatgcctggatattcaattcagtacagagctcatgtgcaaaatataggttggcaagattgggttaaagacggtgccatcgctggtactagcggtcaaggcctcagaattgaagccttagaggttaaacttgtgaaatcaccagatgctcaatcaatatcagttgatccaaatcaatctaacttagtagtaggcaatactacaacattaaaagcaactacaaatcctacagatgcatggatagcatccacaagttggaattcttctaatacagctgtagcaacagtagatgctgatggaaaagtaacagctataagtgcaggaactgctactataactgctacagttaacggaaacttaactgcttctagtaatattactgttactagtccaattactgtagctagtgtaagcctaagtaaaaccactgattctctaaatgtaggagacacagatactttaacagcaaatatattacctacaaatgctacaaaaaaagatgttacttggaaatcttcaaataattccgttgccacagtggacaataccggaaaagtaacagctataagtgcaggaactgccaatataactgctacttcagttgatggaaaccaaactggttcttgcagcgttacagttaaaagtacacaaactgatggaatatctgtttcatatcaagctaatgtacagggtcaaggatggcaaagtccagttagcgattctcaaactgctggcactgtaggtcaaggtttaactttaaacggcctaaaaattcagctgcttaacgctccatcaggcgctagaataaaatatcaaactcaagttcaaaatcttggatggcaaccaatcgtgtatgatggtgatgaatccggatctggtggacaagctttaagagttgaagcagttaaaatttaccttgaaaacatgcctggatatattattcaataccaagctcaagttcaaaatgttggatggcaaaattgggttaacgatggtgctcttgcaggtactgttggccaaggtttaagacttgaagctttaagaatcagaataataaaagatgttcacgtccaataccaagcacacatccaaaatatcggatggaaagatgcagttacagatggaactataataagtacaaatgcaaaaccatttgaatttgaagcatttaaagtaaaccttcaaaatgcaccagctggtgcaaaaattcaatatcaagcacatgtacaaaacattggatggatggatcctgtttatgacggtgctcttgcaggtactactggacaatctcttagattagaagcattaaaaattcaacttgtaaatgctcctggttatagaataaaatatcaagtagatgtgcaaggaataggttggatgaattgggttagtgatggccaaacagcaggtaccataggtttaggtcttaggatacaaggaataagaatagttgtatcctacgatgacggagtacaaactgtaccttccactcaaccttcatcttcacttttaaatacaataaactttaaaggtgctgagtacttaagctatgcttccaacatacaaagtacgaacaaaactgctatacaattacacggtggaattaatgagaataactgcgtatacttctcaagtacagctcttagagcagtaggtttcagcagcattcctctttcaatgtgtaatacaggacaatatactaacttcctacttggaaaaggatggacaaaacaaacaaataaagatttgttgacacctggaagtatatgctttactgttaatgatggtttaacttatccaactcatacttatatgttcttggattgggttaatccagacgatcatactatggcatatgttgctgataatcaaggaagcgatgttcatataaggagtttacttgacgctcctggtatagatgcttttgcttacttccttcatcagtaaaaaacaataaataaaactgcccttaaactagggcagttttatttattgttttttcaaataattatatatttaatccacttatattaaggtaattttctcagttcactatcactagcatatactaaattatttttatttataaattctatttttctttgtatccatgggttatttccccacttctcaactttaaaatcaacattaataatcattgattttttcacatcataccctaattctattatcatttaattgttcagaattaaatgtttgtatctctctacaacttaaataaaatagatttttagcatagtatgttcccatttccttaaaatcaatttcatagtcaccattataattaaatttttcactgaacttaattgatgtcctactagctaaagcatatcttaattccaaaatgctatatatgttatagttgttatccatgatatatccgctgtacgttggatctaacataatccatttccttttctcactaataaacacttcgcatacaacatggttatcaccatcatatggagaaaacggtattagatatacaatcctagctttcatccccatagcaagacagcactccgtcaatataatagataaagccgcggcaatttatgccctatttagatcctttattataagaataactcagtaaatccaacgcattatttacactatatttattaccatagtcccctttatggtatacatggtcagataaccaatttaaaagattgattgccatattctcttcattaactcttccagctacttcatcaatatggtacttatcttttaactcctttgcttccttaccatcataaatatatctaattctaatgcagtcattatcttttctaaacttgtccgtcatcttaagtatgcctgtataaacatcataattcacatatattccccctgcatagttccattttttcagtgcgcacaccttaaagttcttgataataaagcaaaatagcttacaagagaacttttttataagtccttttgtaagctattctaagtaaattggaggcgccacccagatttgaactggggataaaggttttgcagacctctgccttaccacttggctatagcgccctatgctatggagcggaagacgagattcgaactcgcgacgttcaccttggcaaggtgacgctctaccactgagccactcccgcactataaaaacatggtggccagaccaggaatcgaaccagggacacgaggattttcagtcctctgctctaccgactgagctatctggccaaaatggcgacttggaaggggatcgaaccctcgacctctggcgtgacaggccagcactctaaccagctgagctaccaagccaagttaccatgttagacatataagtggtgggcactacagggctcgaacctgtgaccctctgcttgtaaggcagatgctctcccagctgagctaagcgcccacacatacgtcttaatcaagacaagaaaaattatacaacaaaatagattatatgtcaatatgttatttattattttctaatctttttatgagacttcctacctcatcattggtaaatacatattttttgttgcaaaagttacatactacttcttcctgtttaccatcatcatatatctcttttaaatccttcattccaatacttataagtgccttttcaactctatctcttgaacaatcacatctgtattcaggaactataccttcatctaatattttcaaatccatatcttcaaaaataaactctagtatatcctctacggacattcctttggctataagatctgttattgaaggtatttcttgaagcctataggttataagatcggctactaagtcgtctgctcctggcatcatctgtattataaatccacctgaagcttttattgataaatccttatctacaagcactccaaggccaactgctgaaggtgtttgttccgaattcacatagtaatatgcaatatcatcacctatttcaccagtatatataggtacttgaccgacatatggttcctttaaccccatatccctaattacaagcaaatttccattctttcctataattcctccaacatctagttttccttgactattaacaggcaaatctgcattaggatttgctatatatccttttacatgagcatcgctataagatgttactgttacacttttagctattccgccaccatttatcttaagagtaatgctgtcagattctgctttaagttgtgctcccataagaactcctgcagtaagcattctaccaagagccgctgctgctgtaggtgcgcacttatgagttttaaccccctcattaaccatatctgttgttatggctgcaattattctaacatctccatttttagcagttgctttaactaatttatctgccattacttttacctcctaatttaactaaatacgttattctttctgtgaatttttcaacttttttattactatagcaatcaactttatctaatatattaagttgtccatgttttaaatacttttctatatcctcttccttgtacgccctttcttcatgttcttcatcaaatcttttataaaactcaccatctctcacaaaaaaacttatgtacattgacactaaatcatcttcaaattgattttcccaataataaaaaacttcatcatcatcataattaaaatcattattacccaaaacctgtgagagtttataatatgagtttatatcaaatataaaaactccaccttcttttaaatggttactcacagctttaaaatattttttcaaatcatcactatctattatataatttgtagagtcaaggcagcaagttataagatcaaattttctattaatatttaaatttgatatatcctgacatgctagtcttggttttaatccttgactcctaaatttattttctgcttctgaaagcatttcttgagaaagatctactgcccatgtatttttgaacttagggcataaattttctgtaagatttcctgtaccacaggctaaatcgagataatcatcaaacaccaaattattttctacacacttttcaattataaaatcgctccatttcttataatcaacatcagctcttataagcttatcataaatatgtgcaaacttattataacaattcatttatgcaccttcctcaattataattattggagttttttagtatttcctcatttttaggcatctttaagttctttttaactcttgtcattatgccacctatccttccagtctcttcagcagttaaatatccccatccatatttatcgactttgtcctttaatcctaattcctcagctatctcatattttaatttttctctttgcttctctagttcagtaagctccttatgtgattttattttagacttaatcacctttttaagcggtgttttccccatataaatccctccaaaatagtataaatagaattttaacacgctatactattttgctcataataacgttttttattctaatttatgagaagaaatcaatccgccgttattttatcataaaatggttgatgaagcgcttataaactaagcataaaatttaaaaccaaagctttaaaagcaatagaattaccaaaaaagtgcctcctataaccaataaaaaaattggtaaaaaggcttcaaatgcagcaattataaacgctagtttatctttaaatccgatttgaacattttcatctttaaattccgaatggtctttaacacctctcactaaaaacactcctcttgctattatcccacaaactatattaaattacataacaaaaaatgtccaccataaaatataactttttatttagtatcaacagcttcccttagagaatctcctagtaaatttattgacataacagttagaaaaatgcatattcctggaggaatccaaagccacggataatgatcaaaggtataaaaatctcccacaacctgtatcatatttccccaagatgcagatggttctgtaatcccaagtcctaaaaagctcaaggttgactccatcataatattccctcctacagatagtgtagagaaaactatgatttgtggaagaacattaggaaaaatatgactaaacatttttcttctatcacttatccctaatatatcagcagcaagcataaattctttatttttcaattttaaaacttctcctcttacaatacgtgccaaagacggccattgaagtatactcaaaatcgcaacaattaaaaatattctttccttatctgaaatcttcatatcagaaaatattgcacctaaaactatcaatatgggtaaaactggtattgacataactacatctgtaaatcgcataattaaagtatctagcatgcctccataatatcctgaaacaatgccaagtataactgccataattgcttgtagcaaaacggaaaatatacctatcattattgatattcttcctccatacattagtcgtgtaagtacatctctcccaaccttatctgttcctagaatgtgttctacagatggtgcacttttaatattagaataattaatataatcttccccatatttacttaaaaaaggtcccaaaaacgcaaaagctataattataaataaaattagcaatcccaataatgctcttctatctcttttaagcctgctgtatactattttataaaatcctatattccttttcatctgaacacctacttatattttatccttggatcaatgactgcatacaatacatctgcagccaaattacccacaaatgttaaaattacaacaatcatatttatccccataagcaaaggatagtctctttgcaaaacagcatctaaagataactttccaataccgggccagccaaatatttcttcagtaactatagctcctgtgaacaaattagcaatagatataccgaatatagtcaccaaaggtatcatagcattttttagagcatgcttgtatattactactttttcatttagaccttttgcttttgctgtaattatatagtccttatttataacttctagcatactagctcgtacataccttataagtgttgcagcatttacaatagttaaaactgcacatggtagcaccatatgatatagtatatctaaaagtcttttaatcccatggaaattctcccctgttgctgtcattccttcaacaggaaatatattcaaatctgcagcaaaccacttcattaatataagtcccaagaaaaaggttggcatggaaattcccactaaagaaaatacagtaaatccagaatcaaaaatcgaatgctttcttattgcagatattgctccaattggtattgctattaatattgctagtataaaagatgcaaattgaagataaaaagagttccatatatacttattaattacacttttcactggctgatttaatttatacgacctacccaaatcaccatgagacgctccataaagccatttacaatattgaattaccttaggctcatcaagatggtatttatgtctcatttcagctttttctttaggacttatattcatagacgtagctatatcaccaggtgcaagtgtaaatatcatatatattataaaagaagttataattattatcggtatcatgaaaaacagtctttttactatatatcgaatcataaccaattcccccgtaaatataaaaaattgtgcctgataaaaacaccagacacataaaaaattatttaagtttcgccttccataaggatgctgtaaaatccttataaggtgtaatatcaatacctttaactcttgaacttattgcccacatatcatttctttgatacataaatatggttggcatatcatcatttattatcttccatactttttgataatctttttttctactatcaaaatcttgttcttttaatgaattacacatttccttatcaagctctttattagaatatccaaagaaattttgtgctccccctgtcttaaacactacagattggtcaggatttgcactaagacttcccgccataaagaacatatcgaaatcattattttgaactttaacgttaacacttgtaaaatccattgaatccactaaaacttcaacacctagctttttataattttccttcattattggaacaagaatatcattaactggattctcagcgctagctaaataatgtatttgaaatttctttccatctttctccctaacgccatcatttcctattttccatcctgcatcgtcaagcaatttattagccttactagtattaaatttgtacttatttacatcgttattataattccaagaggctatagattgaggctcattgcatattaatccataatttccaaagatattttttacaatactttctctatctaaaccataagttaaagcttgacgtactcttttatccttaaacatatctctattgatatttattccaatatatccatacacattcgcaggaaatgttactaaatcagcgaattgaaaacttttgatttcttctatattttcatcattaggcttaatttcatttaaatctatctcaccatttttaatcatctgcattgcattattttgattagtaacttttaatatcactttcttcacttttggttttccacgccaatagttaggattggcctcaaaatcatattcctcgcaagatttacttcccttaaaaatgtattgtcccgagcctattggcttatctcctgcggcctctattgacgatacatctccttgcttgtaatatttaccaaaatatttttttggtaaaacaagtgttcttgcaagagaatatatagctgatgtattttgcttttcaagttgaaaacttatagtattggaatctttaatttgtattcctgctctttatttgcttttccatcgtagtaatccttccaaccctttatatctactgttgaagggtcaaatgtaatactactacatagcttgtcacataaataagtgaaggtaaattccacatcctgagcagttagaggtgttccatcactaaacttaacattgtcctttatgtgaaaagtataagtaagtccatcttttgatatatcccattttgcaattcctggtataggctctcccttttcatctacatctccaagagattcatacatcatctcccacatatactgattataaacggaccccgaattcaaaggtaccatttttccatcatcaggcttctctataccaactattaattcatcttttctcttttcggctagtttaggaaccttatacggttgtgatgcttttattgtttgtacagtagtttttgaaaagttatttgtatttttgttcacagcaatttgtccacatgcagttagaaatatcatgacatttgctgaagcaattaatgacatcatatgccattttttcatctttatccccctttttccctttattctttaactttatacataatatttaagcaaaatagcgcaaagcctttaaaacaatttacttttttctataaagtaattgtcttttatgtaaatttttttcataaattaccagttgaatataataagtgtcaatatatatataatttttttaatatgatttatgttaccacttttcttatatagtgtcaattactaaaagtttataaatttattagaatatttacattatatattatgttttaaataggcttttttaataatattaatgcttcgcatttacattatatttcactgatttatatgttattacatatacaaacaataatatttattattctctatatttttttctaactaaattatataattagttatatatattatagtaatttaatttgtatcatttataatggtaaaatgatataatatagggaacttaattcaacttatctttgtagtatccatataaatgttggctcttttatactgaattaagttaactctacatcaattaaatgtatataaatatacgtcttttgattttaacagtcatcattttaagctaacaatatgtaattaaggagagtgattatgattgagtattttcaaaggatcagctgttgcacttattacaccttttacacaagatggagtaaacttcgatgaattaaaaaaattattagaatggcatataaaaaacaaaacagatgctattgttatatgcggaactacaggtgaagcttctactatgtccttaaatgaaagaaaagagacaataaaatatacagtagaaacagtaaataagagaatacctgttatcgctggtactggaagcaataatacaaaatcttctgtagaaatgagtatatgggcagaaaagataggcgtagatggtgttttagttataacaccttattataacaaaactactcaaaaaggtcttattgaacacttcaaatctataaatgataatataaatattcctataatattgtacaatgtaccaggaagaacaggattaaatatacttcctgaaactttgtatgcaatgagagaccttaagaatatatgcgcaataaaagaagcaagcggaaatataagtcaaatagcaaaaatcaaagctctttgtagagatcggtttgatatttattctggaaatgacgatcaaatagtacctatactttctctcggaggctccggtgttatatcagtactcgctaatataattcctcaaactgtccatgatatgtgtttctcttattttcaaggaaaaaccactgatgccttaaatcttcagttggataccctttcccttacaaatagtttatttatagaaacaaatcctataccaataaagacagctatgaacctattaaattttaatgcaggtccccttagacttcctttatgtagtatggatgaaaagaacttaaatacattaaaaacagatttaaaaggctatggtcttataaaataacggaggtaacaaaaatggttaaaattttactaaacggttgcggtggcaaaatgggaactgcaataacaaatctttcaaataattacgacaacgcttcaatatcagctggagtggataaatttccaaaatcaaacactggctatccagtatttaaatctatagctgaagttaatgtagattgtgacgtaatactagatttttcaagacctgattcattagatgaaatacttaaatattcatctcaaaaaaaattacctatagtactttgtacaactggatatacaaatgaacaaattgataaaataaatgaattcagcaaaagccatactgttttccgctctgcaaacatgtccattggtgtgaatatagtaaacaatattctaaaaagtgtaagttctatcttatatgaaaattatgatattgagttaattgagaaacaccacaatcaaaaggttgattctccaagtggaacagcacttctacttgcagatactattaaaaatgctatatcagaacagattgattatatttatggaagagaaggcgtaagcaagaaaaagcacaatgaaataggaattcatgctgtaagaggtggcagtattgtaggtgaacatgatttgatatttgcaggcgaaggcgaaacaattgaaatcaaacatactgctcaatcaagagacgtatttgctgctggttccttaaaagcatgtatgtatatatgtgataaaggccctggactctacgacatgaacgacgtcctcggaatgtaaacctatgaaagtttgggcgaagcccattatgttcatgagcttaaagtaacctctatcttggcaatccaaaaacacccaataccttctttgggttgggtgtttttaatattaatttcttttgttataaattattttgtacttctacccacttttctattctattcatacactcctctaattcctttttactatatgcatatgaaattctagcaaatccctcacctttttcaccaaatgcagatccaggaactattgccaccttagcctcattaagaagcttttcgcaaaattgttcacttgtcattccaaaacgtgatatatcaggaaatatatagaatgctcctttaggaagtcttacctcaaatcccatatctttgagcctcttatacacataatctcttcttttcttaaattcatttttcatgtattgaacatcttcatcacaatttttaagtccctctaaagctccgtactgagatattgatggtgcgcaagttgttgtatactggtgtacctttaaaatactactcataaaactactttcagcacaaacatatcctattcttaatcctgtcatagaaaaagtcttagaaaatccactaacaacaataaccttttctctgatgtcttcatactgtgatactgaatagtagtcatcctcgtaacataaggcactatacatttcatctgtaaccgctatgatatcattatcctttataattttatgtaatttttcattatcttccttagatataacagttcccgtaggattagatggatatgataaaaccataaatttaggcttttcatttttaattttattctctagttcgttaaaatctattgaaaattcacttccataaagtccataggttataacttctccttctaagagcttcgtgcagctagcatatgcagggaaagacggatctggaaccaaaactttatcccctttatttaaaagagcttggaatatatctaatatcccctcagttcctcctgctgtaatacatatttcatctttgctgtagtttatattgaatctctttaggtatttgcttatttcatttcttagctcatctattcctgcattggatgtgtatacagtcttattatcctctatagctcttaccattgctcttttcaccttgtccggtacaggaaaatccggctgacctaatgtaagagatattgccccttgaacttttataactttattataaaattttcttatccctgatatctgtatgctattagcacctttagatattttactactttccatttttatgccccctataaaatacatttagagttactatcctgaacacttttataatttataaaattacgatattaaagttatacaataattcaatttatggtataattctaatataaatgtggtttacgctattatttaataataatacaactcacatttaatagtgtcaattcttaatcttttaaaaaggttatgatacataaaatattatttttattaatacaggaggctatttaaaatgaactacgatttaacaaatccatacgaaattgcaaaatacataaaagaggcaaaaaaaacaacaccacttaaagtatacgtaaatggtaacttaggcgactgtacagcagatgatattgactgctttggaacagatgacttttacattttatttggtgaaagtgacaaaatatcagctttcttagaatcacatggggataaaattaaaaaattcaaaatagagcaggatagaagaaactcagcaatacctttaattgatatgacaaaaatagatgcaagaattgagcctggagctattataagagataaggtatccataggaaaaaatgctgttataatgatgggtgctgttataaacataggatcagaaataggcgaaggtgctatgattgatatgaatgctgtcgttggtgctagaggtaaaataggaaaaagagctcatattggtgctggagctgtaattgctggagttttagaaccacctagcaaatcaccatgtgagattggagatgatgttctaataggcgctaattctgttatactagagggagtaaagataggtgctaattctgttatagctgctggttcagttgtagttgaagacgttccttctggtgttgttgtagcaggaactcctgctagaataataaaagaagttgatgataaaacaaaagataagactcaaataatggatgatttaagaaaatagtaaatacaaatttcactctttactttctaggtaaagggtgaaatttattatattgctctaaattaccttcttgtcttgagcattctcaatacctatattaactatattagcttcctcagcattttcttcatctccaactctttccatcttagatatggaaacttcatatgctgttttcttcactgtatccttttcattcactttcttttgatattctctactttgaagtcttccccatattcttatattgtctcctacctttaaagtctcgcaaaatctagaattcctaccccatgctattgtgggtatgtagtctgacttgttataggatctattaacagctaaaagcatatcagatatctctctcccaaaaggagttgttctataaactggttttttgcatatgaatccatctaaaaatatctgattagggtttttacttctttcactgcaatattgaatattacgtgtaaaaactgtaagtataagtctatttgctccatcaacaaatttattataagatctaagctgcccttctacaattacttcctttcctacatctaagtccatccctgtaattaacctttctgaaacagttacaaacaatctatccttggcatcgcttaatctctgaacatcaagataaaaattataaaaaccttccccatacatttcatgactaaattcaagtttagatgcaattactccttcaagataaagcttattatttaacattaagttatccattataacccttctttcccttagttatttaattatcactttaaatataaaatatttaattttttgctcaactttatttccattataatacaattttacacctaatttcaatagcctatttttttacttgcctgcccatataatcaatataatagttattatcgtaaattaagtcagatattctcacgaatttatacccatcactttttaatttatttaacattctatccaaattctttggagtatattttgcattgttgtgaaaaagtattattgatcctggtttaatatttttaataactctatcatattctacattctgaccttgttccttccaatctatactatcaatattccattgtatacatttatgtcctgtgctttctgctacttcaattgtagaactatcataggaacctgatggacatctaaaaacctttgttttggttcctgtaaccgaataaatcttctcatcagccatagctatatctttttttatattttgctttgacattgtagtcatatctaagtgcttatatgaatgattacctatctcatttccccttctataaatctcttttgtttcattaggataatcttctacccatcttcctataagaaaaaaagtcgccttagcattgtatttatctaatacatctaaaatcttcatggtgttatcgttaccccaatttgaatcaaatgttatagctatttttttatctttagtatcgacagaatatataggtaattttttatctttatcgacaaaaactcctatattatttttatgcatatacataaaaatacctacacaaaaaattaaaagaaaaatgggaaaaaatagctttttcacgcatacctttctagcatatattacatgcaaaccttaccctcctttctatccatatctatacaaatttattccttaaaaaaaaatatatgaatgaatataaaaaaaacacaaaaactatttatagaatcatagataaaacttaagttatcgttgttaaaacctaaagtatctttaacagcataacttaataaacatctgattctcatatatcaaattttaaggaggttacaaaatgcctaatagacaaacaacctttacaaatgtacgtggtcataaagaagaattttcttcaagagatttgaatatacagaatagatatatggcaagagaagttgacctacaaaaatcaaagcttaaggaatatgaaaaagataatgttgtaggtgataaaaaggatgttaaaattcctattaaacacaaattaacataatataatgattatttataaaaaaaagcacctatatatggtgctttttatgttataatatttatattgataattacgagcgttaattatcgtttttcataatatgcttaaggaggaaaaaagatgtttgaagacactttagaattagctgaaaacaaacttcttttgctttatatattacataaattagaatttccaatttcgaaaaatcaatttaccgaaataattcttgaaaacaattttatgaattattttatacttcagcagtatatttccgaacttatatcttcaaattttgttaaatcagaacagaaagataataaacacagtgtttccattactcatagcggtacaaaagttttaaacttatttataaataggctcagtatagataaaaaggatttaatagataaatatatatcttctaaccttcacaatataaaaaatgctataagtgttacggctgattatacaatagcaaacaaaaatagttttatcgtagatttaaaagccattgaaaacgacataactttaatagatataaaattaaatgttgtttctaataaacaagctagagacctctgcaataaatggaaaagttcatcttcagaaatatacaataaaataataaaccttcttaccaatgattaaacaaaaataatacctgtaggttcatttcctattggtattaccttttttttgcccgaaatcatatccatacaaataagactattgttatagctgtcacctacatatattatactattttttttcagtactcctcttggcatacctcctacatatattcttttcatttccttttcttcatctaaattaattatactaatagtactgtctccaaaatttgacacaatacagatattattgtcataaaatatatcaacaggccatttgccaacttctatactgcatcttttttgtatattatttagaggtattatacttatagttccattgtggtctgtgcctatattgctttcgcaaactattaccttttctccatccttagtaaaaacagcttttgtaggatattctcccacttttattctttttatataactagaacttccctccttaaaaattgtaatactggaacttcccatatcagatgttacaaacatgttattcttaacattaaaatctatactatgaggcatgtatccacatggaattatttcctctatggcttcatttttaatatcatattttataatactattagaatcaccacatataacgtatgccttatttcccaatatccttaggtcattacaatgcatacctataaatgagcttttgtatacctttctactcttaaaatttataaaagataaagtattactaaaagtatttgaggttactatgtcatcattatacctacaaataccatgaggtccaattctgccggtttggattcttaaactaatttttgaggactcttctaatgtatccaaatctataacagataaatcatctgaaccagaattacacacacaaatagaactcacaattttgccacttcctttccacaataaatataatatgaaccttcgatggttattgttataataatattgacatataagttatttttaatgtatattttatacagatataagtttgtactaattttacttatgaaaggactgatataaatgcaacatgtatataaaacaaaaggtgtctgtgcatcagaaattcattttgatgttgaggataatataataaggaaggtcgattttttaggtggttgtcctggaaataccctaggtgtaagcaaattaatagaaggtatgtctgtcaatgaggctatatcaaaattaaagggaatagactgtagaggaaaaggcacatcttgccctgatcaactttcaaaagctttagaagaattaaaacaagacgcagtataaattttaattctgtaccaaatataaatggagaatataaaacttattaagctttatattctccatttacaacttatatactactttatactctcctcaaatatacctagagctttatcgatttcttcaaaactaacatttagaggtggtaaaaatctaactacattttttcctgccgtaattaagagaagtttactttcaaaacatttatttattatttttttaacatcacaagctacttccactccaattagaagtcccattcctctaacatcatttataaccttatatttttcttttaatgtcattaatttatcaaatagatatttgctcttctcatttacatttatttcaacaacttttttatccacgagttcctttagcactgcaatagcaaccgcacatgcaagtggatttcctccatatgtatttccgtggtcccctggaacaaatgaagaagctacactctcttttgccagcattgctcctattggaaatcctcctccaagagcctttgctatgcaaactatatccggtactacctcaaacttttgatatgcaaaaagacttccaactctccccattccacactgaacctcatcaaaaattaaaagagcattattttcatcacataaatctctaagaagctttaagtattcttttttagctggaattataccaccttctccttgaattggctctactataacagctgcagttttgctacttattttttgttttatgtcatctaaatcattaaatttaacactttttacagctccaattaaaggtttaaagctttcttgatattttggttgtcctgtaactgaaagtgctcccatagttcttccatgaaacgaattatccatatatataatttcttttttattttcatccccatggaggagagcatattttcttgccagtttaagtcctgcttcaattgcctctgtaccactattacacataaacaccttatcaaattcactattcttgcataatatttcagttaattccatggcgttttcattccagtaatagtttgacacatgcattagcttactgctttgttcttcaatagcctttacaattgaaggattacaatgtcctaaacaatttacagccaccccagatacaaaatctatatattcattgccatctttatcatatagctttgttccctctcccttgtcaaaagtaacattaaaccttccataagtattcattaaatagctttttgacattttacaccactcctataagaaattattgtacctctataatttaaaatatcatttataagacaatgatcatttcttccatctataagctgcacatttttagtcccattttctatagcactagcacaacattgcaccttaggtatcattccaccttttattatttcttccttaatgtaataattaacatctttaatatctatctcatgaattatactctgaggatcattaatatttctataaactccctctacatccgttaatattataagtttttctgcatccaaagctgaacttataaaagctgcagcataatcagcatttatattatatacattacctttattgtcgcatcctataggtgctattaccggcacctgtccacctttaagtaactcttttataaactctgaatttaccttggttacctttccaacataacctatatctattgtttcattacctttatacacatatttcttagttgcctctataagtttattatccactccactcaagcctacagcattaactccatctatattaaattgaagcgataattttttatttattttccctgaaagcaccatttgaactatttctattactttctcatcagtaactctaagtccatcaacaaatctactttctattcctgagagctcaagccatctagaaatttcaggaccgcctccatgaactataactatattaattcctagctttctaagatatttaacatcttttataaaagcctcttcagcttttttatttttcataatacttccaccatactttatcacgaatgtctttccactatattgcgtaagtttagataaaggatcttctataggttcttgcatttttttcattttgaacaccaaccttaattttattgatatgaataattatacacattactttataaatattcaagttcttcatgaattttagttgaataattatacttttttatgtataattaaaacaaaataaaagaaactggagtgattttatatgatacaagctggcataataggtgctacagggtatgcaggagaagttttaacatggttactaaataatcacccaaatgtaaatttagtttttttagcatctcacagccatggtaattcatcctttaattctacctatggtaattttacaaatgtaattgaaaatttatgcatagatgataatgaagttgaagataatttggataatatagatatcctttttactgctctaccttctggaaaaactttttctattgtaaaaaaggccgtagaagaaaaggttaaagtcatagacttaggagcagactacagactaaagtctgccgaggtttataaagaatggtataacattaaccatgagtgtaaaaaacttcttaaagatgccgtatacggtctttctgaaatatacagagaaaaaattaagacttcaaatttaatagcaaatccaggatgttatccaacagcatcctcccttgcacttattcctcttttaaagaataatcttatagatacaagttccataataatagatgctaaatcaggagtatctggtgcaggtagaaaggcttccactaataatttattcatagaatgtaacgatagtattaaagcttatggtgtcgcttcacatagacatacacctgaaatagagcaaactcttactaatgaagctaaagaaaaaataactctaacctttactcctcatttagtacctatgaatagaggcattctttctgtttgctacagcaacttaaagaaagaaatagaattaaatgaagtatatgatatctataaaaaattttataagaatgaaccatttataagaattatagatacattacctgaaacaagatgggttaaaggctctaactactgcgatattgcaataagaatagataaaagaacaaacaaaataatagttttatcagctatcgataatttaatgaagggagctgcaagtcaagccgttcaaaacatgaacataatgtacggtttagctgaaaaaactggaatagatttaacccctatgtttccttaatattttatgaaagaaggttgttttatggacacaataaaagtattaaataataaaaatattacagatgttccttattttaaagcaataggtgttgcatcaggaattaaaggtaataataaaagtgatttatgcgtaatttacagcgaaaaaccttgcatagctgctggaacttttactacaaacaaggtaaaggctgctcctgttcttttagatttaaaacatatagaatcagaaaacatatatgctatagtagctaatagtggaaatgcaaatgcttgtacgggtgatgatggctatgaaaaggcatatctaatggctgaatgcacagcaaaacatctaaaaataaagccagaagaagttttagtggcttcaacaggtgtaataggagttccccttccgattgataaggttatgttcggaatagaaaaagctttttcaatacttcccaaaagtgatgctaacaaagctatagatgcaataatgaccactgatactgtacaaaaaaaaatctttgtagaatttatgcttgataaaaaaaaggttacaatttgcgctattgcaaaaggctctggaatgattcatcctaatatggcaacaatgttaagttttatagtaacagatgcaaatataacaaaagatttgctaaataaggcattaaaagaaagtgttaaggattcctataacatgatctccgtagatagagatacaagtactaatgatatggctttattacttgcaaatggagcttctggtaatacactcatatcctcagaaaactctgattatgaagtgtttaaaaaagctcttcactatgtaaatgtagaaatttctaaaatgatagcaaaagatggagaaggagctacaaaattaattgaagctaaagtattcggtgcttcatcttcaagagatgctaaagtagctgcaaaatcagttataacatcaaatctagtaaaagctgcagtatttggcagcgatgctaactggggtagaataatatgtgcacttggatacagtgctgcagaaatcgatccttctaaagtagatatttccttctctaataatgattcaaaagttgaaacctgtttaaaaggtacaggactaaattttgacgaagaagccgctaaaaaaatattggatggtgatcatgtaataatagaggttaatttaaataatggtaaatttaatgcaactgcctggggctgcgatttaacctatgattatgtgaaaattaatgggagttacagatcgtaatttaaataaaaatttatataatacaaaaatagaaattccagatcttattcgacctggaatttgtactttatacagcatttttaaattgactttcatagatttctctatataaaccttcgctatttacaagctcttcatgtttacccctttctactatatgcccattcttcataactaaaattaaatctgcatctttgatagtagaaagtctatgggcaatcacaaagcttgtacgcccttccatcatcttaagaaaagcattttgtatttttatctctgttctcgtatctacactgctagttgcctcatcaagtataagcattggtggatttataagcattactctagctatagttaaaagctgcttttggccttctgaaagattaccacctgattctgttatccttgtatcatatccatctgaaagcctttttataaaattgtgaatatatgctttctttgcagcactctcaatttcctccatagaagcatcaggctttccataggctatattttcctttatagtcccttcaaaaagccaagtatcctgaagcaccataccaaattgacctctaacatcatttcttttcattttgtttatatccttaccatctatggttatttttcctccatctatgtcgtaaaatctcattaaaagattaaccattgttgtttttcctgcacctgtcggtcctactattgctatagtgcttcctttttttatatctacactaaaattttctataagaggctgttttttattatatgaaaatgatacattattaaagcttatatttccctcgcaatgctcgaactttttagctccttcattatcctttttttctggaatctcatctaaaattgaaaataccctttcagctgaagcaaatgccgcttgaagctgtgttgcaaccccggttacattatttataggctgagaaaactgtgtagagtaagtcaaaaagcttgaaattgtacctatgcttaaaccacttaaaactgcaagtaatcctcctacagctccaactaacacatatgtaatattattaacaaatctagttgatggatttgttaatgaagaataaaattgtgctagttgtccgcaattatataatcttgaatttatctcggaaaatttcttctctgctcttttttcatatccgaataattttactattttttcattccctattatttcttctatataaccatttaattctccaacagtattttgctgctgcttaaacattttattagatcgttttgtaataaatgatgctataaaaaaacataacggagtcataagtattattattcctgtcaattttatacttagagatagcataagcagaattgaacttattatagttacaatagccggaaagaattgagttattccttgaaacaatccgtcagaaatagcatccatatcatttgtaagcctgctcattatatcaccatgaggatttacatcaaagtattttaaaggaagtgtacttattttacttaaagcttcattccttaaatcacgtacagtattataggctaatatgttcgcaactgcagtaaaaagccatgtaaaaatagaactaattaaataaactgctgccaaaacaataattattttaagtaaattattaaaatccaccttaccttgagattttatattatcaattccctttccaacaattagaggcataaaggctataagtacattacttattaaggcaaatattaatgatataaacatgtacattttatactttcccacataactcgccagtctaaataaggtcccttttttcatctataccgcctcctttgaaagctgagaattacatatttctttatatacttctgattcttctaaaagttcattatgtgttccgacgccagctacttttccatcatctaaaacaataattaaatcagcatcttttatagtacttattctctgagttaccataagcaccgtcatatccttagaattttcttttaattcctgcctaagtgctgcatctgttgcgtaatcaagtgcacttaaactatcatctaagataagtatttctggctttttcactaaagcccttgctatggtaagtctttgcttttgtcctcccgagaaattagctccaccttgagaaatatttgtatcatattttttagggagtttttcaataaattctgatgccataccaatcttagctgcatctttaatttcctcaagagatgcattttctcttccccaacttatattttcaaaaatagttcctgaaaataaaattgctttttgtggtactactcctatcttctcttcaagcacagttttaggataatttttaacatctattccattaataaaaacttgacccttagccgtatcgtataatcttggtataagatttataagagtagttttgcctgccccagttcccccaattataccaactgtttgtcctttttttatttcaaaagaaatatcgcttatagcatattctttagaatttttatatgaaaaggctacattatcaaatttaataagtgaagcatctctaatatcttctttcttaaactccttattatctaagtaatttatacttatttctgtattaaatacttcctctactctagctgcactagccgctgcctttgtgaatattacaattaaattagctacaattatcagtgctgataaaactaaattagtgtaatttatataggctattatttttcctcttgtaattgcgccgccatttacccttgttcctccaaaccaaagtattgctaaaacagaaaaattcattattatacttgtaagtggattcataagtgctgaaatttttccaactctaattacttcatttgtaagttcttcattagaatttttgaatctttctttttccctttccattttagaaaaagctcttattacccttattcctgatagattttctcttaaaataagtgctaaactatcaagttttctttggaccaccttgtacaagggcaatgatttactcattataagatataccacaaatgcaaatactggaattgataaatacattatggttgaaagtttcacatccaaaaacatggccattataattccgcctatgcataaaaaaggaactcttatagcaagtctaataaacatagctaatgcaagttgaagttgatttacatcattggttacacgatttataagtgatgccgttccaaattcatcaatttcattatatgaaaatgttcctatcttcttaaataattcatttctcaaaattgtaccgaaaccttgtgatgcaatagatgcaaaatactgacatgtaaatgaagccataacaccaaagattgccattaaaatcattataattcctattttaactatatacccattatccttcgtgcttattcctttgtctgttataagtaccattatggttggaattgatatttcaaatatcgcttcaattaatttaaaaattggacctaatataacttgttttttatatggctttatgagttttaataattcaaacaaatcctaacctccttaaatgtctaaaataaacttcctgttgaagatttttaaattttcctttattattatatcaaatgcggttatatattaaaaatacataatacatatcatttatatactttttttatatgggaggttcgtaaatttcatggacatcaaacaattaaaatatttttatacaattgcagaggaagggaaaataacaactgcggcaaaaaaactccacattgcacagccgcctttaagctatcaactaaagaatctagaaactgaacttggggtaaaactagttgagagaggcagtagaaatattaagcttactgacgccggcttaatgctctacaaccgcgcgaagcaaatattaaatctaacacaaaccactatagatgaattaaatgattttaagaacggaacacatggaaccttatcaattggtactgtttcctcttcaggctggtctcttgtaaacaatatattaataaaattccataagaaatatcctttaataaactttgaaattcatgaaggcaatacatacgaactacttgaaatattaaaaagaggcataattgagtttgcaattgttagaacaccttttaattcctatggacttaattgtatctacttacctaaggagcctatggttgctgtaatgcgtgaagattttaattatagcttaagtaatactacgaaaataagcgaacttaaagacaaacctcttattttttatagaagatttgaaaaattaatatatgaagcctgtgaaaattctaattttcgtccaaaggtattttgtaaaaatgatgatgccagaaccacattattatgggcaagtgctggatttggaatagccatagtaccaaaatctgttgtatccttaggtaattccaatttaatatataaaaaaatagaggatgcttctctatcaactcaattagctgctatatggcctaaaaacaactacatatcctcttctgctaaaaacttctttgaaatgttcaatatataataagtaataaattttctaattcaaaaaatatttttaggaaattcttgctttaaaatgtatattttttgtatactattatagttgttactactattaagactcttaactatgaaaatttataacatctacttttttattattaactttatacttaagtcgcttttgcatctataatttaaaacattaattatctttactagcatcatatactgaacattattttgtaataaatcaatctcacaaaattaatcggacaagtatagccaatactaaaaagcttaaataaccttccactatatagaatattttgctacaggaatcttaaattctttatttggaagcttagagtttactctttcctataatttctgtaaccactacataaataaacgaaataaaaaactttgacggaggataacaaatgataaaatttaacttagacttatttcatttaataaataatttggctaacaaaaatcatatgctggatagtataatgatctttatgtcaaaatacgttatatatatttttgcgctaatacttgttattgaatttgccttgggcatacttctcaaaaataattatatgaaaaaaattgctataggctgcgttcttataattgcagttgacttaattatagtatttatattaggtaaaattcatttcgttaataggccatttgtattcaataaggtacatctactttaccctcataaaaccacctcatcctttcctagtgatcacgcggtaataaccttatgtatggctcttggtatatttaaggttaacaaaccactaggaaaagtaatgattttactatcaattattgttggattttcaaggatatatgtaggacatcactatcctctagatgttattgcaggatttatacttgccataatttctagcttcttactaaactttatatcaaagaatacttttagtaaatctcattaaaaacaaaggctgaagcttatcattctaagaacaataagcttcagcctttaatctattataaaattttatactaattttccaaaagaaaatccctgtgattttaaatattgtattatttgagggagggcttgtacagttgtagttttcgctcctgcatcgtgcattaatatgactactaccttcttaccttcaactgtcttcttaacattatctattaactgatctacaggtacatttggcctctctgcatctccattaagcgcattccaatccaaatatctgtatccttcacctgcaacagcatctttaaatggctgcaacttgttaccgaatgatccgcctggaaatctaacaaactttggtatatatttatcaccaagtattcctttaagtattaaatcacatctgtttatatcttcaacaaattgcttaggctgctctttataatttaaaacatgactataggtatgattggccactgtttccccatctgtaacctctagcttggctaggcttggatattcctcagcattttttccaatcaaaaaaaatgtagcatgtatattattttcatttaatatatttaatattttagctgtgtttatagatggcccatcatcaaaagtcaaatatgctatctttttaggactacctttttccatgctccaaggatatactgctcctggtgcatttgcatctatattgcaatcatataaattgctattatctttaatattagcttttttaactatattctttttagtatttttaattaccctattagcccttacaacattttttttattataatttctttgaataatacatgttcctaaaataactataagcgctattgagcaaacaaatactgccctttttttcatcaattttcttttgtttcttatcaatattttcaccctctataattgttaattcaatttattatagcaaactagggatattattaaaaatacataataaatatataattcatatattatatgtataaattatttcagcaattgtgctcgaagcatatcaagaagctttctaagttcttcgctttctttcgcttcctgagtgcacatttttacaaactcgattataaacgatttatttttttctttattatacttattatttaggctcgctatctttaaatctctatttttgatctcaataaagcctttaaataatttaaatgctttttttattattatttcattgttacaattattaatttttccccaatacaaaagaagcattgctcttataaattcgttttcctcatttatcttttcaataagtttaaattccttattatctgcacataatctatacaaaaatataatctttaaatcttcttcataattgctccatgtatttataacatcgttctcatctatgtttattaaaatttcacttctatcatttaaattgagctctaaaaatattttactattgaaaaaatcatagaaaatttctctatcgttttcatcctttaaaagttttatcctaatagcctgctctctatcatttttaaaattcactcctctttcaaaggtaatgcctatcccaggagtcaattctttaagcttgcactgtacatgacctttattaaaatatatatcttgacccttattatctcttatgaatccaaagtcattcatttttttagttcttaggttatatccaccaaaccatcttattaatcctatttccctcatatcaaactctcctctttctcaaagctttttaacatttaatttgtagagtttatctcttaataagtttaatcatatctcctatcatataaagcgatccacatataagaatcatatctccctctttataataggaaatagccttttcataagcccttttataatctttttcagcttcacattcattattgtataccttgaccattttacacaattctttctcatcttctgctctattattatgtggtgaaactgttataattttatatgcatctttagttattaattctaccatcttttttacttctttatccgctaatattccaagtataagtattaatcttttgtatttaaagtgaactcctatactttctttaagctttagtattccatctgaattatgagctccatctacaacaacaagtggattactctttagaacttcaagtcttcctttccatcttaccttagacaatccatttaaaatatgatcttttgctacctttactcctacattttttaacgtttcaatagccataactgcagttacagcattgataatctgatgctttccaagaagagctaacttcacatcatactgatctcttaaggttttaatatgtatatattgaaaatatttattatcttcaagcaaattatctataaattcagctttacctttcctaacgtcaattatacttacttctttttcatgagctgctctttttataacttcttctgcctctttatgttggggatacataactaaagggaccttctccttaataatacctgccttttcataagctatcttacccaaagtatcacctagaattgccatatgatcataactaattgaagttataaccgttaagatagggtttataacatttgtagcatcaaatctgcctcctagtccaacctcaattactgcatagtctacttttttaatacaaaaatataaaaacgctgctgctgttattatttcaaattcagttggattttcaattccttcgcattttaatttatctactgcatcgcttaccttttctattataacgcataaatcatactttgatatattattattatttatttgaattctttcttcaaattcttctatatatggagaggtatacattccaaccctatatccagcttcaattaaaatttggcttatcattgctgtggttgatccttttccattggtacccgctacatgtatgcactttatttttttatggggattccctaaaatttcaagaagtcgaagaattctctcaagtccaagatttataccaaattttaaagaaccatgtatatagttaatagcttcttcgtaattcaaaaagattgccccctttattataatccttaaaaatagcaagtgataagctattaaaatatgtttctcatcacttgctctttaactatttaagtgctgctattctttcctcaacagcctcaagcatttttttatatttttcccctttaactctttcagcttcaactacgctttctggcgccttatctacaaagcccttatttgaaagctttttatctaccctttgtatttctgccttaagcttatccttctccttactcaacctctcaatttccttagtcacatctattaaatcaagaagaggcatgaatagttcagctccctttgttacagacgatacagcattttctggtgcttcatcttttgatttcaagaaacttacagaagaagcgtatgcaagcttttcaaaataatgctctcccatctcaaaagcagctttattttcagcttctgtgaaaatcataaccttagctttctttgacggaggtacgttcatttcagctcttacatttctaattgattttattgcttcaataatttgattcatagcgttttctgaagtttcgttctttaacttttcttcgtatgtaggccatgctgaaattgctatagccttatactcaccgccgagatgttgatagatttcttcagttatatatggcattacgggatgaagcaactgaagtcctactgttaaaaccttgtatagaacattataagcaattccctttgctttttcatcctctccatacataacaggttttacaagctcaatataccaatcacagaattcattccacataaaatcataaaccttctgagatgctattccaagttcaaatttttctatgttatctgttacttcacgaacaagagaattacatcttgatagtatccacctatcagcaagactatattcctctaaatctttgtatttatccattatttctttgtctaagttcataagaacaaatcttgaagcattccaaatcttatttgcaaaatttcttgctgcttctactttttctgtcttataccttatatcatttccaggagcatttcctgttataagcataaatctaagagcatcggcaccaaaagtatctattacatctaatggatctactccatttccaagagattttgacatctttcttccctcagcatctcttacaagtccatgtatataaacatgtttgaatggaacttctcccatattataaatccctgaaaataccattctagctacccaaaagaatattatatcatatccagtaacaagtgtatctgtaggataaaaatactctaagtcctcatttttatcaggccatccgagtgttgagaaaggccataaagcagaactgaaccaagtatctaaaacgtccttatcctgttctaaattttcactattgcactttgagcaagcttttggttctttctctgaaactattatttctccacagtctttgcagtaccatactggaattctatgtccccaccacaattgtcttgaaatacaccaatcttgaatgttttccatccagttaaagtaaatcttatcaaatctctcaggtacaaatttagtctttccagctttaactgcttctatagcaggtttagctaaggattccattttaacataccattgctttgataccattggctcgattatatttccacatctatcatgagttccaacattgtgaacatgttcttttatttttacaagatatccttcttctttcaaatccgatactattgcttttcttgcttcatatctatccattcctgaatactttccaaaaccttcttttatagttccatcattatttaacataacaatttctttaaggtcatgtcttttacctacctcataatcatttggatcatgagctggtgttattttaacggctcctgtaccaaactccatatcaacatagtcatctgctacaacaggtatttttctacctaaaagaggtagaactaacagtttacctataaattctttatacctttcatcctttggatttacagcaacagctgtatctccaagcattgtttccggtctagttgtagctatttcaataaaactatcttctccctctacaggatattttatatgccagaagaatccttgatcctctttatactctatttcagcatcagataaagctgtttgacatttaggacaccaattagttatcctgtttccttgatatattaaaccatcttcataaagctttacgaaaacagttcttacagccttattaagcttttcatccatagtaaagctttctcttgtaaaatcagctgaaacaccaagttttttttgctgtccctttattctctctctgtattccttagtccaatcccatactctttcaagaaatttttctcttcccatttcttttttgtttagaccttcctttaggatctctttttccacccttacttctgtggcaatgcttgcatgatcctgtcctggaagccatagtgcttcatatccctgcattctcttagctcttatcataaaatcttgaagagcacaatcaagtgcatgacctaaatgaagttttcccgttatatttggaggaggcatcattattgtataaggctttttatttttatctactttaggcgtaaaaaaaccttcctcctcccaccatttatatattctatcttcaaattccttcggatcatatgtttttgccatttcatcaaattctttcattcaaattcatcctttctaaatcttgtaaaaataaaaaaagcacagaagtccatcaaaggacgactgtgcgcgataccacctttattcctgctaaaaaagcagactctctataaataacggtaagaaaaccgcttctatctactcaaattttcaatagaagaactcagaagctaccttcaaagtgctttgcataggaaatatttcagctaaaaatttccctctcttaatgccagccttacttttactcctcttcttcagcgtttatattatcatatttcattataatatctataaatctactcatttttattataattaaatttaaaattatgtcaatatatatgttatcagtaataatatcttattttaaatgtgtaacaaatatcattttcttctataagctagtattaagaagatttttattttgacataggattaaaaagaaggtgtgataattgaagcataaaaaacacaaaaatactataataaagctagaagagtgtacatttctaggaaaaggtcatagtggaagtgtgtacttaatgcctgataatagagttgtaaagatttttaaaaatccaacttcctgcaaagaagaatactctatattaagaagacttaaagataatccatattttccaaaaccctacgaatttcataatcattacatgataagagaatacatcgatggaataaatatagatgactatatcaaacaaaatggtgcctcagaaaaattaatgctaaaacttatttattttctcgaatatataaaaaatgcagggtttaaaaaggttgacgcaagatttgtacatgtatttattcaagacaacggtgctttaagagtaatagatcctaggcacagttttagtaaaaagttaaaagtaccataccatttattatccgatttaaaatccgcaggatgcattaatttattttggaaagttctaaaactggagagaccagatttatataaagcatggcattaataaagaaatgacaagttaaaaacttgtcatttcatcactaaatatccaatttttcttgaactgcagcaatttcactagaagccgcatcaagttctatattatttgtgtcttctaaatttttaaatgcagtagataacataagctttatcctatttaattgattaacttcactagcaccaggatcaaagtctacggctgctatattagctttaggataccttcttttaagctcttttatcattcccttacctgtaacatggtttggtaaacatgcaaaaggctgcatacatattacattttcagttccaccttctattaactctaccatctccgctgttagaaaccatccttcacctgtttgatttcctaaagaaactatatctgatacaccatctgctaattctttaatagattttggaggctcaaatcttttgctttcatgaagagccttcttcataggctttctaaaatactctattgcatctatcaatacattagaaagaatctttgatttcttattattatgaagatatctatctttaaaagtagcattatatgaactgtaaagcataaaatccattaaatctggcattacagcttctgctccttctttttctataacatctaccacgttattattagcagttggatggaatttaactaaaatttctcctacaagaccaaccttaggtttctttacatcatttatttctaattcatcaaactctctaactatatctctaacatttttcttaaaggttttaatttttttgttttgagaatccttcttacatatatcaacccatttttcgtaaagtttatttgcagaaccttcaaccttctcataaggtctaaccttaaagagaactctcattaaaagatccccataaaggactgcttttatagcctttataccagtagacacaccatatgttattccaggatttttttcaaatttctgagcacttattgctattacaggtacatttccatagcctgcatcctttaaagcttttcttataaagcctatatagttagttgctctgcaacctccaccggtttgcgaaataataacagatgtattattaagatcatattttcctgactttaatgcctctagcatttgcccaactactattatagaaggataacaagcatcgttatttacatgcttaagtccttcatccacacactttttgtctacagaaggcataacaaccagattatatccctcactcttaagtgccatctctaaaaattggaagtgcataggcgccatttgtggcattaagattgtatgtttctttttcatttccttagtaaatactattctctgtggattttcaaattttctttctggttttacaccatttttttctctttcacccatggcagctttaagtgatcttattcttattcttatagctcctagattgcttccctcatctatctttataagagtgtaaatcttaccatattggtctagtatctcttcaacttgatctgttgttaccgcatcaagtccacagccaaatgaattaagttgtacaagttccaaattgtcctcacgagctataaagcttgctgctgcataaagccttgagtgatatacccactggtcaacaattcttaaaggtctttcaacatttcctaaatgagctatagaatcctctgttaatacagccatatcaaaactatttatcagttcaggtataccatgatttatctccggatcaatatggtacggtctccctgataaaactattccttttttgccagtcttctttaaatactctagaacttcttcacctttttttcttatatcctgccttaaattttcttgttcctgccatgctttattgacagcttcattaacttctactttagttaaattaaactcctgaagctcttctagaagtcttgatttcaatttttctttgtcatccaaggatacaaatggatttttaaatagtatgtctccatctctaagaccatctatattatttcttataacctccgcataggatgttactataggacaattgtaatgattagatgcaccttcctgctcttttttctcataaggaacacaaggataaaatataaactttatacctctttccataagactaacaatatgtccatgtgttattttagctggataacatacggactcagaaggtattgtatccattcctttttcataaacttttttagaagatcttggtgaaagctcaaccctaaagccaagctctgtaaagaaagtatgccaaaaaggataattttcatacatatttaaaactcttggtattccaacaatgcctctcttagcttcttccttcttaagtggagtatatccaaaaattttcttatacttataatcatataggtttggaagatcattctttttaatatcttctcccgcgcctctctcacatctatttcctgttataaaatgtcttccatctgaaaattcatttactgttaaaagacagttattagcacactttccgcaccttcgcatatttgtgtttgttttaaatctttcaagttcgtcttctcttaacaatgaagtattatagccctcagttaagctctccttcgctataatggcagctccaaaagcacccataagacctgcaatgtctggtcttataacttccctttcagatatcatttcaaaacttcttaaaacagcatcattatagaaagttccaccctgcactattaccttttttcccaaatcctcagggtttctaacctttataaccttaaagagagcattttttattaccgaatatgaaagtcctgccgaaatttctcctatttcagctccctctttctgagcttgttttacttttgaattcataaatacagtacatcttgatcctaaatcaacaggatttttcgacatgagtgcggccttcgcaaagtcacgaacatccatatttaatgattttgcaaatgtctctataaaagagccacatcctgatgaacaagcttcatttagagttacagaacttattactccttcttttactctaatacatttcatgtcttgtccacctatatctaatatgaaatccacacctggttgaaagaaatcagcagctttgtaatgagctacagtttctacttcacctatatcaatttttaatgctgcctttattaggctttcaccataccctgtaactgtactattggctatataagcactctcaggaagcttactatatatatcctttagaatctttattgaactatttaaaggacttccttcattacttccatagtaagaatatagaagttctcctccattagatattagaactgccttagtagttgtggagccggcatctattcctaagaaacactttccactatactcctgcaaatctatttttttaaccttatttttatcatgccttgttttaaatttattataatcagcttcatctttaaatagaggcgctaatctacttacatcatcattattagacttattaagctttagaagccttttctttatatctctaaaagttattatttcttctcctttagaagataatgcagctcccattgcaacaaacaactgagagttttcaggaaaaatcacttcagattctttcaaatttaaagtctcaataaatctttgtcttaattccgataaaaaataaagaggtcctcctaaaaaagcgaccttaccctttataggcttaccgcaagcaagaccactaatggtttgattaaccactgcttggaatattgatgctgaaatatcttcctttgccgcaccttcatttaaaagtggctgaacatctgttttcgcaaaaacaccacatcttgcagcaattgggtatatgcatttatgctctttagcaagtttattcaatccagaagcatccgtttttaaaagagtggccatttgatctatgaaggctccagttccgcctgcacaggttccattcatcctttggtctatattattatcataaaaataggttatctttgcatcttctccaccaagttctattgcaacatccgtctctggaataatcttttcaatagtgttggtacaagctatcacttcctgaataaatttaacatccatccattcagaaacagataatccccccgagcctgttaccataacggtaacattttcatctttaaatttttcataagcttcagttataaggcttatgatagtaaactttatatcagaataatgtctttcatatttactatatacaatttcatcattactatttaaaattactatctttacagtagttgaccctacatctaaacctaaatgtaaattttctctcatagttaccttcctatctattttaaattcaatttagtataacacataaattattttttttaaatatattaaatataataattccaattatttatttgatagtattatttatcttcaaataattattattgggattatttttactttagttgaatattattacatataatggatataaatttaaatacaaacttattaaaggaggccgttaatatgatatattttaataaagctacagattactacaacaaaaaagattataaaagagctctttctatgtataaaaaagccttagaattaaaagaaaacgaatctgcttcactatataattctgcggtatgccttataaaattaaaggaatatgaaaaagctataccttttataaagtccgcaattaataaaaaaatagatagcagatacttctttaaccttggttactgctatgctatgatacgagataagaaaaaagctttaatgtatttcaacagagcttgggctcttaactacgaagactctgattgtgaaaaagctataacacttattttaaatggttataagaagttttcattttagtaagaataacatagggaaaccgtgcatttattaatttatatattatattcttagatttagaatattaatacataagttaagtttgatattggtttccctataattcaactatattattatttattactaaaaaccttaatcttctccaaaattttgtttatagtattaacttttctacataagacaatatacattataattgataaaaactcaaatatgaagcttccatagtatattttcctaagaattacacttacacttccacttccatttttgttgataataaagcctgaggtaactccatttaaagttaaatctcccctagtactttcccctttcaagtctaaactccaaagaggtgtaggtgattctatatagtttataagtaatctttctttcttaggattatcaacataaaagtttctcttcatagaatcaactcttgagtactttacttttttcctctctaccttagatggaaaaaactcatcaaaattatttccctcaaacattattagattatcaattgatataagctcagaataatgataaatattataatttcttatttctatatagccatcattcttttcttcacctctgcataatatatgaaattgcatatatgctgctccttttggaacttctactacttgttgatatgaattccactctttcttaaatctttcatctatatcacttatataagtagctgatataactctagtatctttgtccataaatactattttcatatgtctattacgagcaaagcttgacactacatccgcttgaaacaaatattcattttctggtatcacatctatcttcttagatgcataatcataccaatcattagattttgtagccttcacatctatcctaaatacaccattatcaattctattattcatcatattctcatttatcttttcttttgaaggatttgaagtattctctttattatcactcttcttatctatctgttcattatatctaaacttatgcatatcattaaaattactcaaacttggagcattgctgttaaattttattttaatagtgtacctgcccttattaagatgtatatcctttaactccactcttttcatataattcatttgatctggtatattttttaattcatactgaaaattactattcaatgtatctaaatctataacctcatttttgttatcctttgtttctgaaaattcatcacttaatatttttctttctattacattgttatccttaagattttgaatttgaaaagtcacatacccactatttcctttaaaggcattcatgtttatagcaaaagagtaatctccattctttatcacatctatatcgctttttaaagcaccatcttgtgaacttatagcccttcccatgcttaatttagggtatattctgctgctttgaatattgcctgaatactcaaagtcattttccgcttcaagttcataaaaaatattacatttatccgccgtcttctcaatcttttttgtaacagtattatattcattttcaggaatcactgtaaacaaatttatagcattaaacccctgcttattttcaaccttaatagaatttttaccagaatcaaaatgaaactttccaagataaatccacttaaattgacttttcgattcatcaaacgtatctacataaacagatttttttccaaccgttacttttaattttcctccgctcttagacactaatgctcttatataaacctttgcagtttcagctttttttaccttcttattcataacaaaactattggatattttatattcactaagatcatatatattaacatcatgaatcttccaataaattttatgcttaggatttttatacgataaaatttctagtctcatatattttgttttaggtggtgatacacactctcctgtaaaatccatagattcaaaatcaacactatctgagggttttacaatataactactatatatttcatgcatatttgcatcatagaactttgctttaagatgcatcttattagtatttttacctgaaatatttattttaaatttataaggattgttttccctagcttttaaaactccagatttagcgacctcccaattgttagccgaatcaccttcagcaatctgccctttaacctccggggcattactgtttttatctcttatatcagcttctattttatactccctaggattttctgatacaaaaaagctatttttctttaaaagtgttttaaaatccactatgttctttccttcaatcctatcaactttattcggaggagcatttaatttcattgtagagaaggtatatactactcctgaattaaaatcaaaatcaaaaggaaagttatttatatcctttgattctagaagccaaagccaatcaccattttggcacagtgttttagcccaattcatgtatccgtcagcgctatcaactgcatcaaatggaagaagataatcatccttatttaaattgcacattaaaatatcatctagactagaagcttcaatatagtctcctttattcagaatatccatatatgattttgtatctattgaggaaaatataactcctaaattcttaaaattaaagtttggtatgctattataactctctagtttgctaaatccatatggcgtatatatttttttagggacattcgacaaatacggaagactattcttaacatcatatagagctgttattttgttctcataaatctttttgatagaactgtctttatccaaaatcctcctattgaaattttgtctttcgttctgcccatcatactccttatgatacacaaattgatctactccaaatgcacttattagctttcctatgttttgagataagcctctatccattaaatactgaagaaagttaatatagtattgtatattaacagaattaccttcatgttgaaaaatagtatttttagaggatgaatatacctgtatatctcctgttgccttatccattccatacctttctccattcacattccaatatggggttgaaacccctgttttagactgcgtcatattatctgaaataggaagatataagactttacttgcaaaattgcttttattcttaagcttattttgcagttctgagtattcttttggctccttaaccggactataaaatccacttatataatgtacataaaatggatatatgtatattagtaggcttgcaagcaatagacctacaattgataaagaaaaagccttgaagtatttggatttttcaaatattatagcaatcgaatacactccaaacatcagtaacacactaaaaaaacatatcataagcgctaccatcttattgggatctctaaatatgctgccaataacaggcaaattatttattcctataaatatactataaaaccaatctaaattaggtcctgtcgatactataagaaaaatcacaccaagaaaagtaaaacaaagaatcagatatctttttcttgttttaagcacagctgcataaagtattatagctaaaattacgcctcctgctatataaaaactcaaattaaggttttgaatattgaacataggccaccaataagatgcaagataaagtatattttttatagaactgtatttcgcaaacaaaaaaaatgtgtcaactacattcacattatgttgagaaacttgagcttttaaaactatactaaatacatacatagacaaccaatatgcatttacacatataaatataggaataaatatgaataactttactgtgaaatttatcattattgctttaaaactatattttctttttattgatgcatctataaagagcttaataaaaataaaagaatttataataagaataactatgatcccgtaaaaaaagtaatgtattgcagcagcacttagtgcaaaaacaatacttaacataaacatatcaaatatatttctcctatatattttaggacttaatatatcataatctttaattataattttctcaaatctatagtaaaaagcattcaaataaaacatcaacattagtggaaaaaggctgtatccacataaaagataaatatgctgaattcttgttataacccacggatttacagcataatataatgcacctgttataagaatactttttttaacaaggttatctcccttagaaaaatatatatttattaatttatttccaaatacatacatagatattcctgaggttagtattattcctgtaagaaaacttttgaaaaaaacagcaccactataattaaatataatagacagtaaataaaatggagtggtatacattaaacgtgccacatttaaaagcgttgaagtactccatctctcattccaaactccaaaaatttcatccatatatccttttgatgagaatccaaaatctatatcgctgaaaacaacatgtccacttttatatagcggatgaagtataagaattgtcaatgagcttagtactaaaatgcataaaaaatcgtatttgtacttataaaagaatttctttaatttatctctagttttcttcatatattaaaacttcctcactttttacgttttagaatttgagatactcctacgagagtgagaatgacatacatatttatcataccaattgttaaaataggatgtcttaaatatcttttaagattacttcctctatataaaactggtctaaaaaaataccatcttttaagtgtctttataaaccctccttcttctgactgaattgtcttatccattacagaaaaataatacatttttttcttaagtaaatttcttaaagtaacaaacttttcatcatgataaacctttgtaaatacagctcttttaactactcctcccttttcaacatatcttatagttggttgagtttcttcaaaagaaatttgacttggatttattcctcctgataaatcataagcatccatcctccaaaatcttgccgcctcgatagaatttttgcccatatcctcacctgagttatttattatattcctttcaaaaaccttgactttagaataaaaattttcatattctgagaaagcatattcaggtactataagtgcccctacatttttatttttgttaaagaaactcatacatttctcgattagattatcttctaaaatcatatctgaatctattatatatatatattcactttctaatttctttgcaagtgatattgccttacctctagctatacctctttccttatgtacaagtggtataaacttaaatctagaatccttctcttgaattttcttaaataactcttgagaaccatcatttgaaccatcatctgctactattacaaataatttattatatttctgttttaaacaactttcaatacactttaatgctttttccctattattataagttgagaaaacaattgatactataccttccaaagccatttctctcctttatatagagaaacacctcaaaacttatacattatttaatatctccatatcatttcttgaggcttttctcatttagtttatttataaaatcatcaaaatactttgatgtactgtcccaattaaatttcaatgaaaaatcatgggcattttttctcttcaggccgtattcattttcattttccagaatgtttttcatgaaataatacaaattttcaggagtattttcctcacatagataccctgcttttcccttatccactgcatccactagtcccttagaattgtaaactacagttggagtaccgacagcacctgcctctataacagttagtccaaagccttcacgtattgacggaaacaaaagtgccttcattttactcattaaagaaagcttttctttttcggacacaaacccccaaaatgttatatccctattttgacctctattaccataagttatattgttttcctttaaaataggaagtaatactttttcaatataatcatcctttttctttccaataatccaaagcttactattagggtaatcttttttcaaaatgcaatatgctttaacagcagcatctatgcctttataattaacaaaacgccctatatatccaaaaatattatctttttcttttaaaagtgaatccttatcccatggtttaaaattaattccctctggaaagattgtaaccttatctctatcaaaacctatatctataagatcctttttggttgaatctgatactgtaatagtataatcatttttatacaatcttaaagtaggggtttcaaataaatatcccaaagtactgataggaaacctagcatttatatgccatatttccctcgttagctgatgtataaagaatatcctcttttttttaggaacccatagtggtgtaaagaacttgtgggtgttacactggtctacaacaaaatcaatctcatccttatttgttttataatactttttagcttcacttattaccgataatatatttccacgccttatgtaggttacattatctataatttctttttcctttgctccttcaaaagtaggagagaaatgtgttatatcatatttattgaaatccagccttttaagcatttcatgggtgaatacctcagctcctccacttttaggacattttatgtctcgccacgacagaaataatatattaattttattgtctttcactactactctctcctttcttttaggttttgcttaagaattcctgctaataatataaaaaataatacagcgtagaatccaatttcaatatatataattgaacttatacttttatgaaataaagctattataataacaaatataacagctgctacaaacagagttacaaaatgcatccatttttcaattatcatgtagatatttactatcatgaaaataaaactcaaaaaaatatatgatactattcctataaacaagtagtttttggctgatgcatatgcttttccaaaaaacattgctaccgtgtatggcattacaaatttgtaaaatccaagagttaaaacacttatagctatcattattaaaaacaaatttctaatgcagttattaaacctttttctgtcacaaagtctctcagttagaagtggaataaatactgtaaatatactggaagaggcaaaagttaaaagttgattatattttaaaaccactgcaaatattccagaattttctggcaaataataattcaccattatcatatcaactgaagtaaagaagttaaaaaagaaatttgctatataaatatttgcaacctttttcataattcttttagaaatcctagctttttgcttaaaatttattagctttctcaccttatacattccatgaaataaagaaaacaccataccaagtaatatagctaacagcgccgaatgtatatttctactatttttcagtagcacaaataatactgcaattttagatattacttcaatataaaaacttatattaagcatgaaaaagcttttcattccttgaaaaatacctcttataacactcaatataatattagaaccaagtgtaagaattattataataagactgaaaaaatcgctatttgtagccttaataatgactgaagaaaaaacaagcataaaaacaacaataattaaaaaacatattaatgaacaattgagtatactttttatgtcaggttccttatcttctccttttgaaatatattttgctgtataagtttgaaaggatactcctaaaacagtaagaattgatatcaatgataaaagcgaattaagtcttccataatcccgtggaataagataccaacttacaaatatatgaaaaaagtaattaactccatttaaactaacatctagcacaggaaatattatttcttggattctcttttttctacctagctgatttgagatattctgaatattcaatggtttcctctattattttcttatagttttctcctaccgttataggttttgtcagatatctgtatacctctcccttattaatagcctctattataaaagaggaattataatttcctgacagtgcaactctaacaattttaggatacttattcttaactatctgtaaaagctgaagaccatttattcccggcataagtatatctgttactattacatcaatatcattattctctaaaatttctaaggcttccttcgcgctagaagcataaaacttattgaacttttcaccttttaaaataccatcaagcgtctttaaaataaactttacatcgtcaacaaataatattgaattcttatacataaccctacctcctaaacaaaattaattcatatttctatgtaatctttttatcttaaaaatactttttataaatttcaaagagtccttaattatatttacatgtgagccttctctatccgtgcacttaacaggaagttgaaaaactctaaattttaatttttttgcaatatatagcatttctaagtctatagctaactgcatatcctcatgtaaatacggcaatatatatttagcacaattccaattcattatttttaatcctgtctgagaatcatctatcttacaaggaagaagcggttttgtcacaaatctcttaaaaaaactcacaattctcctagcaagattcctatcatctgctgttttatccttagttccaattactatatcatagtatccaagcttgattatatttaacattaaagctatatcatcaatcttaaatgaatcatcagaatccacaaaaattattgtatctgcacgtatgtagctaagagcttctatatatgtgcctgctttttttgtattgtaatccaacttatagtaggatatacttgccttatcatctatccattctacattttctctatagtgttctaaaagcttatttactaattcttctgtttgatcagtacttccatcattcaagaaaaaaatactagcatttgtaaatcctttttctatcatgatttttatcttacttataaaatcatacacataattaattctagctgcttcattgtatataggaataactacagctatatccgatggctttataaaatacattggctttaaaatactttgaatgttatctacaatctcatatggatattttcctttccatctaagtatctttatttgcccaagtccttttatatcatttagatactggaactcttcagttaaagaagtcttagcatttacgacaatgagaataggaatccacatatttgataatctaatgatattgcctatagtaatgcattttgatgaactatctgtatctactataaccaaagaatgtgagatttccttaataaagttaagcttgtccatattaaatatgtctatatcataaaatgtaatcacttctttgtatggtatattgcgcttaccatcagttattataagtattttattatccatctttcgccctccccgcagactccaaattttgctaactgctatttatgtttttttacaattaattaatttttttatatataaatgcaaaaatttgtttatattacatcactaccaaattatatcataatatcataaatgctacaaccatagtaaatttaatttttaacaaaactattaggtgtaatctatatttccctatattaagacaaaaaaataaaggatagtatttaatttaaacactatcctttaactattatattaattaaaattataattaccattcaccaattacctttgaatttctatgatctatattaaatgatccattattaaagtaatttccacctttggcaaatgtagtatcaacattaatccatgtgcccatttccggaacatatacctgattccatgcatggcttacccatgatgtaccattaaagccctctcctgttactaaccttacctttatattgtttgctctcgccatggctacatataaacatgaataatcaaagcatatgccttttcttgtattaaatgttggaatagcaccagacttaacattatagttattatttaaaaccatatttgccttctggtaatcatagtctatatcataccctatccaatcatacaactttcttgctttatttaagttcccttttgaagcagaagtcaaacttctagcaaaattattaatttgatcatttgatcttataccttcatctaaagttacaccgttataataaacaataacattagaattaccatcttcaacatttgaagcattgtcatcattttttaatgcatttcccactttattaaggctatcggttttcgtcacaatcttaaatgaattgtccaaaatattaggaaaacttttagctacacttgaattagttacaggtattattattctcttgcataaatagttatatgcttttgaatccttaagataactatttatcttcatgcttggatttattatagcaacagcgtttaacaaaaataaaacagttacgaggtaacatactgctcttggaacttgaactaccgctccaattattcttttaacagtattgcttttattagatataattctatctaaaacgtcatatatattaaaaaaagtatatcttgctattaaatttagcactacagaaataagcttatatactatataaacaaagataggtataattataaaatataatatatatggcttacttgctaaaatactcgatatttcacttggtataaatttatatatcttactattttcatagtttaagaaaataaccttataatatcttattcctataaaaatagctacaataaatgatatactattaatcagattttcagtgtccctttttaagtcatacgaagagaacttaaacaaaaagcccctagctataggaaataaaaataaaaatactaaaattaaagttacaggattagtcttcaaattaatcacctcgatatcgacttagttattttctgaaaaaatttcctttaaaacctcacctatttcactccaagaatagcctcgtcccaataagtaactgcttaattttctttttattttaagcttatccgtttctcttttagcgatgttattaaatttctttaatgcaacttctctcattgcttcaatataattttcattattagctgaatatttacttagcttttcatctataatactatcatttattcctttttttataagaccatactttatcttaactttaccttgtttatttattctttcctttatataaagttccgcatatctcgaatcatcaacaaaatcatactttctaagaaactcaattacacgctctataattttttcattaaattctttttctctaagctttacccgtatttctttttctgttttaaaggttttttcaataaagctcaaggctctactcttagcatataaataattatcctcttcaattatatcttgaagataatctaagtcaaccactttacctttttttaaaccatgaatatatatcaattcagtgttacacgaaaatgaatattcattatcaatatatacgttaaccctatctttttttttcttctgtgcttctattttagttatagtgttttcttccaagctacacacttccttttgctttcactacatatattgaaggattagttagtacctttaaggcaacttttcttacatcttcattttttatggtatccgcatatctcatatcttctacaaattcatatatatcttcaccatccatacattgatgaagtacatagtttccaatatcagtagtatcctctattgtaaaagcaagagatgtctttaaaacctttttcataagtagaatagaattatcatccagccatttttcttcatattttattttttcaatacagttatttatgctatcgatagtttctttaacattctcattatttactgctgtataaatgtacattgttttaacattttttgataagttaagatccgaatatatatcataagcaagtcctttattctctcttatttctctaaacaatatgctatttgcactttcccctagcttataatttagtatcttaagagctgcttcctcgaacctatttaaattataggcagtaaacatatatattatactgctttgagatatatctttcctatgacttgtaacaattttaggtatgttttcttccacaattatgtctttgtccttaacttcccctttattccaatctccaaagtacttctctactaaatcaaatacctgctcatgctcaagttttgacacaatgactataaaacaattattaggtatataatactttttataaaaatcaaagataaaatttctgctaaaaccttcaacatttgctttagtacctattgtgtcatattttaatgggctttttgaaaatccaatttcatgtactttagtatagcaataatcctctatatcatccttgccactgtttaactctgacaatattacttttttttcttttttaaattccttttcatcaaaggatggattttgtatcatatctgaaatcaattctacagccttagtcatctcttcataaagtgcagttacactatatactgtacagttataatctgtataagcattatactctcctccaagattctcaaaccttttatttaactcctcattagttaggcttttagtacctttaaaaagcatgtgctccacaaagtgagatgcccctctttcttcattgctttcatatatggaccctattttaacaccaacgtgtaaggaaaacaacgctgtttccttttttatagaaataacttttattccattatgtaaatttaattcctttgaatcaaaaatattgttattcatcaaactctccttcattattaaggtttatatattataattaaatacaacaatccataaaataaattatacctcaaatatatggtaaaatgatataaaaaaataaaaaatatagagcttatataaaatcactatacacaccttataaagtgatatttaatactaaaccctatattttatagccaatatcaaaattcttttctaaatatacattttcttcaaagaaagaatatttcttacttcatcacttaatctatcataattagaaaacaaagcctctaccatatctattccatgcatatttataacaaaataattctttgtaatttcccccattattcctttatctattggactgtctgttataatcaagtaattatttatttgatctttataattggatataatatctaatatacccttacttgatgtaacatcctgatcttttaaaatacaaactctaattatatttttagtaaatttcaatttatcttcacttacaataagatatgaattcttatcatcattatcaaaattagagctaactttataattcatggcatttaaaatttcctttaaaaccatatcaaatttacttttatccattttataaattatagctttgatgcattcaagtacatcattatataattttttctctttctttattatctcattaacattaccacttgaaacaagaagtcttcctatctccgcctcacatccaaaaaccatgttaattgaaccacttgattttaaagactttttaaggtcactagacatatcatcttcacttatatgttttcctaaccactttactttaaaggtatttgggtatttaggatatttagacggattgtattcataatctgattcaactatccctatatagtactttctactttgagagttatatgaaagtatcttatccccttttgaaatttccttagaaaacttccatatatacccttcacattgaattctcatcattggtgtttcatcactatatacttcatcgcatctaactagaagcttatcctttgtatcatattgggtaggatcacctatctctggaaacccaaatgtaaccacgctatcttctacccacttgttaataagattttcacttccattaacattattaatcatccaccaatttgccactcaaattcctccctattttcaccataacatattatattattcaaacctcatgaacttttttagcactttatttttttctataactgctaatagcggaagtccaaaaacataacaagctactagctctcctactcctacacaaatcgcatttactaaaaaaggagcatgagttactatctttaattccattccaacaattactgcattaactattacaggtggcagaggtgcaatatatttcttaaattgaactttactcttaccaataaagtatgttaagcatgccgctataaaagtagctaaagttccaaataacatatccatcttcataatgctaaatatatttgctacaaaacaccccaaagtaagccctacaatataatatcccgaaaaaaacggcaatattgttaatgcttctgctacccttacttgaatttgcccataagcagaaaaatataacgtcaacgtaagaacagcataaactgctgctataagcgcatttgatattaaaattcttaaagtacttcttttgttcatgtaaatttacctccatagttttatttatagacaggatggtttcgaactgtcttaaattaagaaaactaatgtatatactatatacttattcctatattaattatccgcatatatcctataattgattttcggaaatatattatccattccttctattttttcaagttcactgatttcaagagtatttttagttatatcatcataaagtctcataaacctatcaatgtgagtatttattctccttatagcataatctacagttgtattattttttataataaaagaccaatcagaggcctctgctaacataagctctctagctgcttgatttaatgcccttttttgaagttcagaagggttaatataactattagcaagtcttaccattatttcttcacacttatgaatgtctttatacacccaatgatttgaaggatttatccaaactgaataatctccattttctccccaacttgagggacttggactactacattgaaccattgaattattttttaaatactctgttggagttataagctcataagaagtccaatcttctgcactttttcttataaaagcatttataaaatcaggaccttcaaaccaccaatgtccatacagttcagtgtcatagggacatgttattatagggggcttatccatattagcagctgctgcatttatttgatcatgcctgcaactagcaaaatgagatgcgtgctcccacactttcttcatagcattttccctattatatatgcccttttctccagaatttccagttattttataatacttaaatcctgtatcaattcttataccattttcattaatatatggcttaatatattccattggaagttcaaatcctatatccctataaaattccctataattgaaatcacctggatatcccataaaatcgctccatacttgatatgaggagtccatatccctaccaaaggcacatactccacttggcgctgctataggtgtattggttccatacataggtttaggcgatgcataatcaatagcctttccttctgaaataaaatactttattccaaattcactaagtatattatcaatgccataagtatacgcacattctggaagccatatcccatttggttcatgacccattgtatttatataggattgaacccctgttgctatctgtgctttaactgcctgtctgttaattaaaataaggggcaacagcgcatgagttgcagcacaggttattatttcaacacatcctaatctatcgtattttctaaaagcatttattaagttgttatcatatttttcgtatattttaagtgtattttcagctcttttattataaaaaagtgctaccttattttcttctctgttattttttgttcttagtatttctttttccgaaagttctatggttttttttaagtaatttaaatatctagaatttaaatattcatcttgaagcatagacataagaggcggtgttatggacatagtcatcctaaactttatattgtcctttaaaagattatcataaacctcaatcaaaggaatatagcactcactcatagcttcaaacaaccatctttcttcaagtgaatctcttgtctctggatgtcttacaaatggcatatgactatgcaaaacaaagttaacatatccttttttcaaaattatcccccttgctataatttctttactttagatgaaccaggtgacattttgcgatattttgtttcattttcttccatttgtttttgaaaatattcgttataatatctatacgaatatatttttatatctggatagtttctaatttttttttccttccataaagacatatggctttgtctctttatggatatcttgcttattgtttttctcatctaattcgtttacttcactatcttcctgtttcttaaaatttttagaaacatcaacgtaatacactgctgaatcttctgatatatgagctcttggcgttgtaactgtatttgagacagccaaagctacaaatgtaccatcaggaagcatccttccaagcttcacaaaaacatccatatcatctttgtctaattttatataccaattatcagccatagaatctatgtatatagttctaatttcacttgcatttccatctaaaacttcatatatctttaaaacaggttttgaatttttccacaaatcttctccatatctgtactcaaattctttaattgttataggtgaaatattaaaatagcaaaaaatattataggcattttgaactaataatactaatttcgtctcataacttccaagcatttaatcacctcttgtcactatataaattcaaactaatattttaattgtgtaaaaatttcaacatctgttcaaccttttatcctcatttgttaaattaattataacttaaaacactaaacatgtcacgtacaaattgccccctctcctctggcttttatttaatgtaagcgctgtatgatacgcttgtacattatattttattatagataacttcaaacccttattatcagtattttatactttgtacaaatttagtatattactacaatttaaaaaatataaatgaatataaagtttttacaaaattattttaatagtaaggaggtgtagattaatttgaagatatcaaaattccaaaaaattatctttgttctaattcttatcttgatcatagaaataatacttgtgattcaattttataaaatgagccctactaattctaaactttctggatacaattctaagaaaaaaatacttatagttgtagatgtagttagtaacaggatgtgtgtatttcaagatgataaattacttaaaacctacactatagcaggtggaaaacctagtactccatctcctattggaacatggacaattgttggtaaagacacctggggagaaggctttggaggaagatggatgggatttaacgtaccttggggtaaatatggaatacatggaacaatattcccagactctataggtgggaacacctcacatggatgtatacgaatgagaaatgatgacgtaagagagctttataaaataacccctgtaggaaccaaagtaatagttcagggaggtccttacggtaattttggttcatatctgagaagtataaaaccaggagatcgtggatctgatgtatacgaagtccaaaaaattctaagggaaaaaggctactatagcggcactcctgatggaatttatggagaaggcatgaaatactgcatacataagtttcaaaaggacaataatttatatatttctgacattataacaagaaagttctatgaaaagttaggtgtagatttaacagagtaattttcagctcatattgacaacttaacctactttttctataatcagattaaacgtagcagagtagatattgtgcgtcaagtgttagaggatgggaagttgtctctaaacgaaaagcttagtcttgcggttcaatatcgcttccgctgttacattaaagggattttggaaataactttaccacttcctctctttaatgtggcaatcattaaggaggagaggaggttttttgttttttgaataagtaagctgcgtaatcttaagataggagtaacaaacaatgaataaaacaaatacaaaattccttgtaaccacagcattatttatagctatttctattataataaaagcctttggtatttctataactggaggaggtatagtaataatgaagataaactttagcgctattttttacctacttccaggcttattatttggtccactatatggtgccattgcaggtggtgcaacagatttacttggtttcttgataaatcccactggttcttatattccaatttttacactaaccaatattttagctggatttctgcctgctttactctggaagaaagttaagctattttccacaaatatattaaaaaaagtctacattgcagtctttgttttaattttcattataggtatgataaactccattataaatttcatatcaaaaccatcaatttcaaaaacttttttaaacttaggtaaaaattcaagttatgcagggcttgtttttgtcataacaagcataataggcataactgtatttatcataaatgaaattatcgagaagaaattcaagaaattttacttcacttacttatcctgtgactttttcaaaatatttatctccgttggactttcaggacttttagtatcaaccttaaatacgatttttatgcttatctttacaccagccctttacgaaaaaggttttatgattttatggttccctagaatagtacaaactattataatgacaatgataaattcatatgcattatcaattttaatgtatttatacaatttcattgataaaaaatccttaagcagggcataaaaattccttgagcttaatgaataagtttattaaactatttcattaagctcttttaattatttacttattgtattattgtcttctctaaaccctctaccgttaataactaattatatactttttgtaaaaaaaatcaataatctgtatgctcttaatcagcataattcctttactagcagtttctgttttttctgatttatactttcaaaaaactttaacaaatgaaatagcagaaaaaaaccttaatttagtttctgaaactaaatatagagttgaatctttcataaatcagcctatttctcttataaaaacattatcaacttacccatcaattactgcctttaatacaaccgagtcgaagccaatattagttcaagctcaaaacaatgaaaaatctagttctggcgttcagattgtcttagatgattataatggaaatcaaattgtacgcggtgatgataatagccttgtaaatatatcaaaacgtgactattttaaaaatgctataaaaggtgtttctgaaagcaaacaaatagtcttaggtaaaaatactaatatattaactttaaatgttggaattcccgtaaaagattcttctggttctataaagggaatcctacaaggtggaataccattaaaaaaaataagcgattacgttaagaatttatccataaatggaatgactgtttatatagttgacaaaaatggcctaatagttgctcacccaaataatgatttagtagtatctagaaaaaatttaagtaatataagttatataagaagtgcactttctagtaaaaaagatggtacatacacctataaggatgctaataagggcaagatactagtaagctctacttatgatacacatacaggttggcttatttgtactgaaattccttactccattgctatgaaaagttataacaactttaaataccttcatgataatattttgtatcctcgtatgcgctgtcatttccataattggacttgtgatttcagacaagttaactaatccactgataaaactacagaaattatcagatcttattgcaagcggagatttgactacaaatgattatgaaataaaatcaaatgatgaatttggaaacttgacacattcatttttcactatgtctcaaaacttaaaaaatcttataattcaaattaaagaaagttcctcacgtcttgaggatgtctctactgaaatgttaaaaagttgtagtgaatcagcctctgcgtcctctgatatatctcaaaatattgttaatgtagctgatgactctaatacatccctaaataagttaaatgaagccaatgatagcgttctcaatttaatagatgtgttttctcaggttattctaaatgtaaacaatataatttgcaaagttgaagaaacctcttatgtatcctctaaaggcaaaatggacataaataaaattactgaacaaatgcttaacatagaaaatagagttaattctttatctgaagttatctctaaattaaaaacacactgtgacaacataaataactatagtaacgttatttccgacatagctgaagaaacaaatttactttccctaaatgccaatattgaagctgctcgtgctggtgaaaatggaaaaggctttagtgttgtagctgataaaattagaagtcttgcagatgaatcaggtaaagccgctagtgaaataggtaatctaatacgagagatgaatgaagactcaataaaagctataaattcaatgaatgctggaaaaaaagaagttactagtggaaaagttattgtggagcaaactaatttaacctttaatgaaatagcgaattctataaactctattttagctgcaacatccgaagtaacggcttcaatgagtaccgtaaaaaactcaagtgaaaatgtatcttcaactatgagttccataaaaaatataactttgaataactctagcaagatacaaaatgttgctgcctctactgaagaacaatcggcattttctgatgaaattaaaaatcaagctacaaaactacatgacgtatctagtaaattacatgataatatagctacctttaagatataagaggaagacagcaaagtaaatactttgctgtcttttttaattaaaccattcttttataatcttcttacttctatttgatggatagtaatttttaactccgttagtattacctatagcaaaaacagagaaacccaaaaaccaatcctccgtaaataccattctatacgcttcaaaacatctcgcttgttcttctccattttctacgctagatggctctggattccaaggctgcttagatgcatagttccttctcggaaaacctaattctccaaagaatattggtttattccactttttatgtagttgttctaactcgtcaacaatcctttgccctcttccatttacagttgttgcatataagctattctttatgtaatccacattgttaacagcattgtctgttatttcaaaatatgctgctacagaaatataatcaacctttgaaaaaaccttattattaagcttctcttgaaactttttcttcgattcctcatcccaagaagctgtataccaccaattagtcttatatgttattaatcctttatacctacctcttgcaaaatctattatatcacaccacttatcactatattcttcaagattaacaaaatttgaagcaatacataaagcatctactctcttaggaacagcaacttgatttattatcttacctattacatcatttttccaaaccttaaaaaatttatttatatccttagggtgcatattagtttcataatcttgtcctttatttatccaaggataaggttctaatataacatttacattccttttatttaattcatctataatgtttttagctttcttaacacttttctcattaaccgaaatagatcctgcatccaaatcagatatatcaacttcaattggtacatttacagtgtttaagttcatactgtctatatctttaatagcctgattaactgtataatccacagataaatttccagactttatttttgttctaaaacatgaattaagtgtttttccatgtaatttattgtataaaaacgcttcatatgctccaactgtactagaaacattgctcaaaatcagtattcctataagaactatgctgcataaccccaaaaaaacttttacacctgttcttctctttatcaaattagttctacctctcaatcaactataatcttcttaaattttcggccttgtatccatattttccctctaaaatatcatcaattatagatagcatttttcttttgtcgtatggtagtgtcccacctatacttgcataattggatgcatgattgcttctaaaaacacattcttcttttacatttatattttcaataagctctttcatttcaatcatgttttctttaggacttagaagttcaaactcatccttctgcacctttttataaatttctgtccccttctctaccataagtgtcaaaatacctatataatctggatttattaaatttataaccttcgcagactctactgcattctccttaattttattctttccacctatccccgatattaatgttactgaaagtttaatgccacttttttttactttttgtccagcttctactatttcctttgaagtaacccctttgtgtatttcatttagaatactatcatttccactttctattcccatataaactatagaaagtccagtactttttaattctattaaatcttcctcagacttatttaaaatatctctaggtgctgcatatattccaattcttttacactcaggaaacagctcctttatctttaataatatcttttttaagatgtctttttcaatcacaagagcatctccatcagctaagaatattttattaaccctagaatatatctccctagcctcatataaatcttcaaatatttcctttacgcttcttatcctaaattgtttttctttatacatactacaaaaactacatctattatgggagcatcctacagtaatctgaattatcagactgtaagcttcactaggcggcctgtaaactattccttcataaaccaattttgacgcctctcctttctatatcaaatgaagtttattaagagcattataaatgccatcatcagcagcactatctgttaccatatccgccttatttttcacttcatccactgcatttcccatggcaataccaatattcactgttttaagcattgtaatatcattttttccatctccaaaggccattgtatccttcatatctcttttcatatacttaactaaatattctattcccttggacttatcccaattcttaaaagaaacatctgcagacaaataaggtttatgtgtattgaatattagcttatgttcaagatattttatgcacttctccatatgttcattattcttaaaaaatacatctacattgtttgcttcaatctcttcaatgttccaattatctaaaatatatggattttcagtcttgtaaaacctattcatttggtgtattttttctgagctcatattatatgaatacccattgtacgcaccactaaaacttgcacttatacccagcttacaaaattcctttattaaatactttaaagtatctttatctataagtttattatatatacacttaccgttatatacaatatacgtaccattacaacaaatatatccatcaaccatttcttgaaattcttgaatagcaaatcttataggtcttccactgcaaataaataaattatgccccttttccttaagctttttaagtgcttctttagtgctatacggtatagtagattctttaccattatgaactaacaatgtaccatcgatatcaaaaaaaattatttttttattcattaaaatcctcctattttttcacccctacatcatttttgcttaaattttatacaaacaatactgtgtaatttttagaatttatatgcaatatttaattatatataataaattattactttacaatgttcacaaaaatattataaaatttattataaaggcaggtgtttatattgaacaacataggacttatactagaaggtggcggaatgcgaggagtgtatactgctggtgttcttgatttttttatggataaaaatttatattttccctacgttagcggtgtatctatgggagcttgcaatgcagcctcttacgtatcaaagcaaagaggtagaacaaaatctgtaactgtagacttggctgacgattcaaggtatataagcttaaaaaacttcattaaatacaaatctatatttggaatggattttatatttgatgaagttccaaataaattatttccatttgattttaacactttctccaactctacacaaaagcttgttattggaactactgactgtttaactggaaaggaagtatacttttcacactcttcttcaaacgatattttagacataataagagcttcaagcagcttaccatttatttctgaaccagtaaaaataaataattatacacttatggatggcggaatagctgatcctataccaataaaaaggtcaattgaagatggaaatgccaaaaatgtacttatactaacaagagaagctgattacataaagaatccgtttaaacataattggatactttcaaaaaaatactcacagtttaaaggcttatgtaaagcaattttaaacagacataagttatataacgaaaccttaaagtacatctcccatttagaaaataccggaaaagtttttattataagacctaccttctcaccaaaggtaaaacgtattgaaaaaaacaagtctagattaaacgccctttatctagaaggatataaggacgcagaaaaaaattatgataaacttcttcaatttctaaactcaaactaattttcatctttcaatcactttataaggtactgtaaatttcattttacagtaccttattttattgatatgctaaacatttataattatactgagttttttatatcaagtacctttcctttcataccacaatcaaattataattttatatattttgaatataaatttcaattggggttaaaataaaccaatatagtaataaactttttaaaggaggcttactcatgaaaataggttttccaaaaggtcttttatattgtaattattaccccttttttaacagtttttttagtgaattagggtgttctatcgtaacctctcctgataccaacaaggaaattttaaatttaggagttaaatactgcattgatgaagcatgtcttcccataaaaatatttcacggtcatgtggcatatttaaaagataaatgtgattatatgtttatcccccgacttatgtctattagctcaaatgaatccatatgtccaaaattctgtgggcttcctgaaatgattaaaaatagtatccctgatttccctgacatgatatcttacccaatttacatggataccgaaaaaaactttatgaaattcataaaaaaatgcggtcatctattcacaatgaataacttcaaaatccaaaaagcatacttaaagggaaaaagcgctcaagctgattttctttcgaaaaataaaattcacaaagtacataatataaaagtagctttggcaggacacccgtataatatatttgattcatatacaaatttaaatttaataaagaagcttgatgaactaaacataggtatactaactgaaaaagatatagatgaaaatcttataaataagcaaatgaaaaccttgtttaaaaaaccattttggacattcgcaaggaaatcttatggtttttcaaccttttgtgcaaaaaataatctagtaaatggcattatatacgtatcatcatttgcatgtggcatagattctgtagttctagaattgataaaaaaagaacttagtaacttcccaatattagttcttaaaattgatgaacaaactggagaagctggttttaatacgagattagaggctttttctgatatgctagaaaggagatataatttcaatgaaaataacatttcccaacctaggtaacaccttatatgcagctaaagctctttttgataatttagaaatcgaatacgtacttccaccaaacagtagtaaaaagtgtctcgaaataggctctctttattctccagaagatatttgcctcccctttaaaataatgataggagcttacatagactctatagaaagaggtgcagatacaatacttataactggaagctgcgggccatgcagattcggtgaatattgtgaacttcaaataaatctattaaaaaaattaggccatgacgtagactttatcgtcttagatagaccttcttctatcggcaaaaccgaatttctcaatagattatctaaaatatctggctcaagttctattagttcttataaaaaattaaaagcagtatattctgcctataaaataataaacttaatagattatatagaaaaaactgctcgttataaggcaggttttgaattaaaaaaaggagaatgcaaaaaaatactgcaaacttgtaaaaaatccgctttaacctgtaacaatgctgaatctatgattgatttgctaacaaaatataagcatatgataaaccatgttcctatagattctactaaaacccctttaaaggtttcaataattggtgaaatttataccatactagaaccattctcaaacctttatattgaaaataagttaatggatttgggaatatctacacaaaaaaatataaccccaagttggtggtttaaagatgctatgttatcaaatttaaatttaaattctataaacttaagaatgaattcaaaaaaatatcttccatattatataggtggtcatggaagagaatgtgtaggtgaagctgttatggcaagcaattctggcttcgatggtgcaatacagttatttcctatgggctgtatgcctgaaattgtgtcaaagtcaatattacctacaatatctagggataaagatttccctatattatcattaataatagatgaaatgactggtgatgcaggttatatgacgagaattgaagcatttatagacttactagaaaggagaaaaaatagatgtattatataggtgttgatgttggttctgtaagtacagatatagttatgttaaatgagaaaatcgaggtcgtagatagtttatatttaagaactaaaggtagaccgataagcgctattaaagaaggctttaaattcttaagcaccaaatatagcgatgatcaaatacttggagtaggaacaactggaagtggtagagaaattgcttcttacgttcttggtgcagatgctgtaaaaaatgaaataacagctcacgccgtagctgctttaaatataaacaaaaatgtaagaaccataatagaaataggcggtcaagactctaaaatcataatattaaaagatggtattgttactgatttcgctatgaatacagtttgtgccgctggaactggatcatttcttgataggcaagcagagagactcgatatacctattgaagactttggaaaatatgctcttaaatcaacttgttctgtacgtattgctggaagatgtgctgtttttgcagaatctgacatgatacacaaacaacagttaggttacaaggaagaggatattataaaaggtctttgtgatgctcttgttagaaattattttagtaacgttggaaaaggcaaagaaattcttcccgaaatattctttcaaggtggtgtagcatcgaatgtaggaatgaaaacctcattcgaaaattatctaggatttaaggtcacaataccaccacatcataaagtaatgggagcaattggtgccgctttaattgccaaagaaacgcttgccaaacagaaaaagcatacaaattttaatggatttgccttgtcaaataccgattttcattctcaaagctttgaatgcgttggctgctcaaatagatgcgaagttgttagaataaagaataacaattccactataggtgcatttggcgatagatgtggaaaatggagtaaaagtagcgcagtataggataattttaaccacatttagtattattacaataatatgaaattattttgttaattttagtttcatattgtataatgtatagtatagaatttatatattatatggtaatagtaataagggtggttgttattatgagaaaaaaaaatgagcaaagaaaattcaaacgaactgactacaagtgtaatgtagattcttttatacttaatggagaattgcaattggaacaagttgaaatcctcgatataagtgaagctggtgcaagaattcatgtgccaaaaagaataaatgtaggtgacagagttacctttaactttaaaatgggctctttaaacataacctgtaatgcaacaattgtttggggaacaagcagtttaacagacggctttattaatggatgtaagtttgatatcctggccacagacaagcgtcttttaaaactttttatagattccctttataataaaaactttatttctttatacagagataaacaaacatatatagttccaaatatgtatttaactttaaacttatctaatactgatatatacagagtattccaatacgctacttatcaattaggtactttaaagaaaactgataataagtatgatttggctatacatgataatcttgttaataggctaaatgactatcttaataataatttagattgttttaaggtaagtatatatgaatctactcaatttaaaagaataatagatttttgtatcttgagtcttcagtataatgatgaaaatatatcagctttaaggttagaagatcttgatatgtcagattttgatagtgaccgtgctgaaaaatacaaaaatgattttgaaaaacttcctgaagatattagactagaagctataactgaaatatctaaatctttatcagccaaaggattaaaagttttgaattagtaccacgttataaacttcttgaaataagttaagtttagtaatattatatatagtgaagctacgtttgctaaagcttaatattataaaaacacattaacattgtatttttgtaatatatgagtttgttttgcagtagtttcactatatatatttatatttattaattagaaatatacatatcatatatgtatattttttatgtagaaatcaatatatagagtttctagttaaattaaattagaaactctgtcaagtgtttctaatttaaacttaacttatattcgatattgacaagttaagtttaactatagaaattctgtacatatatttttacacaaaatttaagatagtaggtgtttattaatgagtagtaaaattttaaccgaatccggaaaaaagaaacttgaagaagaacttgaatacctaaagaccgtaaaaagagcagagattaaagaagcattaaaatttgctcgttctcaaggtgatttaagtgaaaatgctgattatagtgcagcaaaagacgaccagtcaatgaatgaaacaagaattcaagaaattgaagatatactaaaaagctgtactgtagttgaaagctctgaaaatgaaaatgtatttgatttaaataaaaaagcattagttaaattttgtgatacagatgaaacagaagaggttacattggtaagttctgttgaatcagatattaaaaacatgaaggtaagtattgactctcctcttggaaaggctttatataagtcagaattaaataaaagaactctagttcagtcacctgatggtagttacgaagtagaggtactgaaaatcctataagaaataggcttaaatgataaattcatttaagcccttcttttatttcaaaaaagttttaattaaattatgatttagtagatcgtcagaatactctaattcagttgtcgcagcttctttcttcttattaagttcaggtgtctcctttatctttttacctgtagctatatcataataagtgttagtccatgacacataaaatatcttaccatctgtaaacgatccatttctaaatgtaacattggtactatcaccatcttttacatttaatatatcttcaccaaacatataattattacttatgttatataagttagctattgtaggataaatatccatctgccctgaataagtatgattcactcccttatgttcgtcatctggaaaatgaataaacataggtactttttgatattcataccacgtaagatcagtaggatcttttatcccctcaaaactataaagttgatttatattttcttttggtatagcaaaatgatctccatataatacaattattgaattcttagttaatccttctttatcaagtttgtccaggaacttacctaattgttcatctgtataatgtattccttcaaagtaatttcctaaaagagtatctttatactcaccaacatctaacttattcatagtatacttttcatatccagccgtgtcgttaaaaggatagtgactacttaaagttataaggaaagaaaaatatggttgtttaaaagttttcattttagccaatgactgatttaaaaatgactcatcacttaatcccataccaactacctcatcatttttataactagtctgaccataaaaatcatcaaatttttctgatttatacattacatttctattccagaacccctcattatatccatgaagcgctgcagtatagtatcctttgtcgcctaaatctttaggaatagaattaaaagtatttcctgcatatgtataatatgcagctccagattgggcaggatacaatgaattcaatgacataaactcagcatcagatgtatttccttgagctacttgatagaaataattatcaaaatataagcttttatttatccatttattcaaattaggtgttatttcttttccatttatacttttgttcacaacaaatccttgaagagcctcaacttgaatcattatgagattttttcctgaaccttctgatttgaatttaacaccaggaatagagttattattcttaagatagttattaattgcattcttccttgcttcaggcaacttctttgaatttttcacctttgtgcttgtaaaattataggcatctaccacatgaaaatttaaatttcctatcatctttgttaggtaaattctattactcattgcagtaagcagtgttggttgttccacattaactttatgaaattgttgtgcatctaaagctgctccgaatataaagacagctaaaaataaaactaatctaaactttaacttaatagtatttttatttatgcttttaacataaataaaagttggaacaagtataataatatctaataaaaacataaaatccttaatgcttagaacatcagccacactcgattttacaccaaccaaaagttttgctgtttgaacagctgaaaccgttattatatctttattatacctaaaataagctatatccgatatgagaatgaggcttattatcaaatcaattataagtaaatacgctgttctttttttacccttgaataaaaaagagaaactaaatattattaatactgaagcaattattggtgttataaccgaactatcaaaatattccggtgaaatctcttttccataagtaatcaatttaaaaactaagattataaaaaatactataatatcaccataatttaatattttccttgtcttctctgacaaggtatttttgtatattgcagaaaatctcatctattcatctctttcctaatttaaaatataataacacttaataaatataatataaaaaaattaataatacataaataacttattaattttcaataaattatttatgtatcatatatgtgtatccttaaaagcttatggaatccattacgaaacttttacttcaaatacatcaagtagaaacataaatagtggtatacctaaaagtagtccccacgttcccataaaatctcctgatactataagtattataaaagtaaaaaatataggcaatttagttttggaagacattagttttggatttaagaaataactttctatacagtgtatcactacaaccattaatattacataaattacttctgtaaatccattaatattaaatgcaataaatgataatggtacaagcgaaattataacaccagctacaggaataagacttagtacaaatatcataaatcctaaagtcattagattaggaaaacccattattgcaagtgcaatagatgataatacagcattcacaattgctattagtatttgtgcttttataactttaccgaatgagtttaggaagttattaccataatatacaaagtactcatacatagtagagagcttgcttttctcaaacttcttaccaaatttctttattgtgcccttttcaagcacaaagaataagctaagcacaaacgctaaaaataaattcaaactcacttttccaaaattcttagcaaattctattatatagcttaaaccctgcttagtgtaagatccaatatctaatttagtaatcattggttgtatgtattttcctaatgttcccaaatcgctagtatctatagtattgtaaaagttagttgcttgatttacaatatttgttgtttccctaactattactggaacataattatagaaaacaagcactataacagctattataagaacatataatagtaaggcaattaagccttccctaacttttatatattttctaagatttgatacaataaacccgtgcagactgctaatcaaatatgtaactataaaggtcaataatataaaattcattatagacctacaaaaataaaaaaatgcagccaataatactaaaaacgctcctctcttaaaggactctttatgaaacaaatctaaaatataactcaaatttgtaccctccttttacagtactagtttactatgaaatgtgcctaatttcaatgtaataaattttaattctaaacaactatttaacaaaattgtcacacatctgtcacacactaagtttattattaaaacatacaaagcagaaacaaattaggaggtaacaatgatggacgatttaaacaataataacgtgaataataatgatacagataatacaactgaaatgaataataataacaatgataataccgttaatatgaatatgccaattgaatataaaaaagaaagcaataaaaatagaaaacctttcaacaaaaaaatagcatcatatatagcagtaggtttaacctgcgctatacttggaggaggtatatcaacagcatcagccttatatcttcttcctaaatcaaactttttcaaaagtacaccattatacaaaactatggctaatggtggaagttcttctctaggctatattaatgcttcaccaacctcaacaaagacgtctagtgcaactggaagtggtttaactgtatcgcaaatagtaaaaaaagttagccctgcagtagttggtgtatcaacaaaaacgactgtaacccaaaacgattttgattccttctttggctcaagtaatggtaatggaagctctacacaggaaggaatgggatccggaataatattcaataatgatggttatatactaacaaattaccatgttataaaaggtgcagataaaatagcagtaatcctaaacaacaaaaaagaagtttcagctaaagttgtaaattatgatgaagctaatgatatagccgtaataaagatgacaggaagctttactgttcctggtgttgcagaacttggaagctcagcttcattaaatgttggtgattcagtcgttgcaattggaaatcctttaggaaaagaattcttaggaacagttacaactggagttgtcagtgctgttaatcgtgaagtagccgtaagcgaaggtcaaaaacaaacttatatccaaacagatgcagctataaatcctggaaacagcggaggtcctctagtaaattcattcggacaagtagttggtataaattctgctaagataagtgaaaacggcgtagaaggaataggcttctcaattccaattgatactgtaaaaagcaaaattcaaaatctttctaagcctatactaatgcttggaataagtggtgaagctgtagataaaagtaccgctgaacagcataatatacctcaaggtgtatatattgaacaaattcaagactttagttctgctcaaaaagcaggtatgcaggttggagatgtaataacaaagtttgatggtaaaaaagtaacttctactagcgatatcgattctataaagtcaaaacataactcaggtgatactgtacaagtagaagtttacagggacgatgcttataaaaccctttctttaaaactatcagacaaataaatcagcataattttagggaaaaataaaatttcaccccattttcaacattaagaactccatagcttccgttgtggagttctattatatttttaactattgcaagacctaatccagtacctccaacctttctatttctagacttatcagttttataaaacttatcccatatcttacatacttcatcaacttcgattttttctccatcatttacaacttctatagtaatcttgttattttcttttaacatatttacgtgaatctttctcttagcgtacttcaaggcattattaagtaaattggtaaaaacctgctctaacctatattgatcacccattacgtatccatttactatatttatgctcatatctattttcttttcatctaatattgcatagtatttttttgaacatttaaataccatttctccaatatcgaattttcctaatgtgagcttaaaatttccactttccaattgtgataaatcaagcatatcggaaacaagttttcccattcttgccgcttcatctataattacatctgtgtaataatccctttcttttttagtcactgcaacgttatctttaagcccttctgcataaccctctattattcctataggcgtcttaagctcatgggaaactccggccacaaattcctttctcatcttttctagttccttttctttttctatgtccttcttcaattgttcatttgctgctttaagtgaattcattgatttattaagattatcagctaaaaaatttaagttttttcctaaatatcctatttcatcttcagatatgacattacacttttcactaaaatccagctcagccatttttgaagctgttttgtttattttctttagtggttttgtaatcattctagaatatattagtgctaaaataattactacaactacagcactaaaaaatatgtaaataaaaaattccttcattaccgaagatgcctctgtaattgattggaatgatgatattgcaaaaataacatcattgttagctccaggaactacgcagactatatttttaacattatatgtcttgctctgaaaaacataagtctcactttttccagttcttctcatatttaaaaaatcagcaggattagatacccaagtgtgcattatatccttaattatatttatttcggcagtatcatcttctccatcattttcaaaatacttcaaatttccataactatttaatatagctaccttgcaattattttttctttcaaattcctttattatactcccgatatcatcataaggattattttcattggcattatattgttttttaagttcttttgttgcgctttcaagtgattgcatttttttgttttgataaaattttccaaagaacgcactttgaaaaaccaacattcctaatatgaaaacaacataaaaactcaaagttataacaaacaatttagttgttatgctgccctttatcttcattttttcacctcaaatttgtatccgcttcctcttactgttgctactaaatatgccttatcttgtagtttttctctaagccttttcacatgagtatctactgttctaagatccccataataatcttctccccaaacattatctaaaatcttatctctcgtaagcgttatacctttattattagaaaaatatattaaaagatcatactcttttggagaaagataaatttccttatcttcaatagtaacctcatgagaaatagcgtctatcttgagcccatcaaaattttgaaccttagacttttcatttggctgaattctttttaatagaactttaaccttagcagtaagtacctttggactacatggtttagtaacatagtcatctgcaccaagctcatatcctaaaagtttatcatcctcttcactcttagctgttaacattattattggaacctctgacttctctcttatatttgtgcatacagtccatccatccaaaagaggcagcattatatctaaaatgacaagcgaaattgaatttctgtcaaacatctctagtgcctctttcccatccgccgcttcaagtacactgtatccctctcttcttaaataggcttttatgagctctctcattctatcttcatcttcaactataagaatactctcagacaaaatatatccccccataccaaataatttattgtttttcttctacaagcatattttctttactatttactttaaccttttcacgttttagtatcattgcagaacaaaaagctgtaagaggtattgtaaatattaaaccaatacttccagctaatgttttaacaagctccgaagctattacatcttgatttataattctatacagaggaagatcatatgatgaaatccatatcataacatacatagcccctcctgcatatgccaaaataagtgtattagccattgttcccatcatatctcttccaacattcattccagactttacaagctccataacagttgccttatcattggtctcatgcagttcgtttattgatgaagctattgacataccaatatccattacggcacctaaggctcccattaatattcctgcaaataatagtccgctaaaattaaagcttgtattttgagtaatataaataaccatttgttcttcctcatcggtcagtcctgacaaccttaaagtaattatactaaaggtagcaattaatgctgacagtataagccctccacttgtacctataatagctgcaagagtttttttgttcttcccacttataattataagatttattgtacttacaactatacatattacaattgaaacaatagtagggttaaaaccagcaattataagaggaatcattatctttaatactgcaacagctgttatagcaagggcaattacagatttcactccctttttacctccaactacactgagaagtattataaatactgccacgagtccgaaaataaatttgtaccttacaacatcgtatatgtaagcactacttatgtttcctttactatcttcatctatattaatgagtacctcatcgccctttttagtaagcgtttcgtgggctgtcttttcattaaccaagttctctaactttatcactttacctttgtaatcgccatttaatatctttaccaaaacataagtcctattcaaagagtttttattcttctttgactttttattttctggcacatttattacattaaccttagaggtatttttattttttttgctgttacttgataactcctgtattactttaccgtgtataactaaatccgatttattatcatcactaaaataaaaatgccatactaataaaactgcaataaatatagctgccacagtcgaccatattatcaccttttttttttctggtcataacttcatcccctttttagtatatagtttctagataattttaatatatcacagctaaacataataaaaaaagtgattttttaaatgttaatcatatgttaaaattattgttgtataaaaacactgtgtaaaaagaatagaggaatgtcacatgaacaaattaaattttaaaggaagcgttatgttaaacccaacaccagtggtgcttgttacctctaaggataaatcccaaaatttaaatgtttttacagtaggttgggtcagcactgtctgtactaaagatccaataatagctatgggcataagacctgagagactttcatatcagtatattaaggaaagttgcgaatgtgttataaatcttcctacaacaagtatggttaaaattgttgattactgtggtgtagtttccggtagaagagttgacaaaataaagcattttagtttaccccttaacgatggagtatcaatttcaacaccttctttagaaaattgcccagtagccttagaatgcaaagtaaaatcggttactccacttggaactcacgatttatttcttcttcaagttttgaatgtaaaaatagacgaaactttattagataaaaataataaaatatgctttaacaaagccaatcttatgtgctataatcacggggaatattacggtttaaattcaaaacctattggttcctttggcttttcagttaaaaagaaaaccaaaaaaatacacaggaggaaaaaaggagactaaatgtcttccttttttaatttttggcactatgaacattcatttcttccaaacctctcacttaatagttcaccatataccttaaatcacagttactatttttgatttttatcataaaatacaattatacgaaatattttatattgatatatttatgatttatttgtattataagcccttagcctatcaatttatattaaactttacccaagcataatcttaatttaataatgcttttataaaatagttatgggcacagaaacaatgttcactttctgaaacctcctttacatcaaacggtattttaccttaacttatttttaaggggagatattaacatgttattatttataaggaaattagatgatttcataatttctcgcattacttttaaaaacagtagaagatttttagataaactcatgattttttgctcatatttgggtaatggcggtgtaatatggctacttatttgcacttttctcattgcatacaaaccctacagaattgttgggataagtgtactgttatccttagtaattagtttaatcgtgggagagggaataattaaacactgtgtaaaaagacttcgtccctttaggactaattctaatataaatattttaattacgaagccattatcctattcatttccttcaggtcatactttttcttcctttgctgctgcaaatatgctttacctatactttaatggtttcgcaattattttttttatattagcctctcttattgcaatatcgagaatatacctttgtgtacattacaccacagatataattgctggatttgttcttggacttttatgttcgaaacttctttttatattgataaattacgtatcaatttactattgctcttaaaattaagacaataaacgccgctataaaaagcattactattgatatttgaaaaatatataaaatgaggactcctatttggattatatccagtgcaaatgtatgccttgatatattaaaagcatcgataaaattaaatattaagagaataataaatgcaacacaaaatcctcttgaaacccctcgtatgtcacctctatccggtgacatacttaagcttatataaatagccaatagtaaaaaaatgtacaagtgcttatttcttacagtagaaacacaaaaaaaatcctttagtaaatccacatttgagttaataaatccattcaaagtatcaaaatccaatgttatagaattggcatctttacatactattttgatatcatcattaaatatcgttggaattgtgaatttcatcatcaaaagcataattacaattccacacaaaaaaggcattaatcctataaaaaaatctcctattctttgataaaaattttcaccttttttaaagcatttcacgtatcccagagtattgtttttatctggttctttaatcaaactaatatcctctattttatgagcaaacaaaatggccgtcccagcatgaagcagttgatgaaaggtagatccaactgctcccactaccattacagccttacctccaatactttttttaaaattaccgattataaaacttctaaagccacccataataaaactaaagctcactattacaactataaagtaaacagcttctattagtgtcctaattataactgctatctctgttatatagtataccttcatttttaacacctcttatgcttttaaaactctaaaaactaagctaattaaaaatgtaatacaagaaaatactactgctacagaaagaaaacctgtcatcagcacgttatacttaataattatagaagcagatatatagctagataatccaaccatatttatgaccagtataagtaaaaatattgaaacaagttcaacccatgctccatttatatcagctttactcaaagatatgtgagaagatatacatatagcaataaataaaaataaatagaaatatggatttttaaaattttctccattaaaaatattctttataactgaccaattagaaattaaaatattatgaatagaaccattatccaatgtagttatatttaaattttgtttcaaagtcaccataaaattattaaatacagctggagttgtgactttaagaagtagcattattacagttattcctccaaagatgggcgcaacgcctataaaaaagtttcctattctttgatatacactggatggattataagtatggttgacataccccaaaacccccttttcatctgggttttgcagtaactttatgtttgtgactttatgtccaaataaaacagctattattgcatgactcagttcatgaacaggaacccctaagaagcctgttatcataactgccttcattccaaagcttctttgaaaattagctatggcagtatttctaagaaaacctaatatgaaaccagctaatattataatacctgttaaatataatgtttctatgaatgtctttagtattaaattgattattccattcactttacttcacttcctcacttgaatagctatttgtattaaaacaatacattatatataatagctttaattataccacaatacaatacagttactatttacactttttaaatatatggttaattgtaatttacaagacaaagtggtatactaaccatgaaataataccatattttaggcacctaatcttaggtttaatagggaaattggtgaaaatccaatgcaacccccgttactgtatacagttacaaaaccaatgtccactggagttttctctgggaaggatggttgaggctaaactgtgagccaggagacctacctaaaatattatggaacttcggagggaagtgaaatccataaacataatcatgctattcaaacaattacaagcttgaatggttatttttatatttatgcattaatttcattctccgcaaaagcggagttttttcttttatataattattattagattaatacttttaagggagattttttatgtacacaaaaacgaaagcatcaatttcagcattacttattttaattactataaccctgtcttcatgttcaggtactaaaaacaaagatatttattctagaaagaattcaaatgcagcccacactgtagctacaataggatatgataataaaacctatgtatctctaaaagaagcatttaaaagcgtaggtggaaaatgtactctaaacggagaaggtgctattgcttcaaaaggcaaagatataataaaagttagtgcctcaagcagtacagcttatttaaactcttcaaaaatagcaatgagtgcaaatccaaaattaaaaaacaacgacatatatgttccaatggactttttaaaccaagtaatggatgccaggataacttattctaatgggaaattaaatatacaaacagaactacctttaaaatatactaaagccttcaatataaaatatttaaaaggcggaatcaaaaaaataaccgatggtaacaataaaaccgtaatacttgtacctaaaaataaaactgttccagcagaatataaaaatgagaccgtaataacttatccagttaataatgttctcgtttcctcagccactcaaggttctcttcttagacctcttgatgaaattaaaagtataaaaactgtaactttaaaagaaaacgagtgggaaatagacgaaataaagtctttacttaatgataataaaataacttacattggagatactacctcgcctgactttgaaaaaatttcttcatcaaaacctgatgtagctattctgtacggaggaagttatggtcttaataacatgatgaaaaaatttgatgaacttcatataaattatacttcagataatgaatatctagaagaagaccctcttggaagattagaatggattaagttcttatcagccttttatgacaaggaggataaagctgaaaattattttaatcaacaggtttctaaggttatggctacagaaaacaaagtttcttcactaaaaaagccgaaggttgcctttggaatggtagataacggcaaagtgtatatacccgctaaaaactcatacgctgcaaaaatggttgatatggcaggtggcgactatatattcaaagatttaaacaataaaagcggctacataacacttgaggatttctactcaaaatcaaaggatgctgatgttctaatttattcttcttcaaaagaatacacaccgtctttaaaatctatgttaagtgctgccccaatactaaaaactataaaaccagttaagaataaaaaagtatggtgctttggtaaagattattatcaggcaatagataaaactgatgagattatagaggacttagcttcaatttttcatcctgaaagcttcaaaggatataaaataaaacattattcgcactactaaatattttaggaggataattatgaatcttaatctaacaaaaaatatgaaatatatcttacttttaattctcctatttatagttcttatttttacctttatattttcaatcagcacaggttctttaaaaataaattttggtgaggtatttaacatcctttttaaaattggtgactttaacgacggagattatcaaattgtatggaatatacgttttccaagagcaataggagctctcataggtggctctgcactatctgtatcaggtctccttcttcaagtgttattcaaaaatcctatagtagaaccttacgtacttggaatttcttctggtgcaaccttatttgtagccttagttatgcttggaggcataagtttcggttttgctgcctcctctccttttttagtatttttagctgctttaataggttctactttaattatgtttctagtaatcttgtttgcaaataaggtaaaaagtgtagttaccttacttatcataggaattatggttggatacatatgtagtgctgttacaaatgtcttatcagcctttgcagataaacagcaactgcaattctttaccatgtggacacttggaagtttttctggcttcacatggaaaaatatatatatattattttttataggtataccttctcttttagcagcttttctaatagtaaagcctttaaacgccttcattttaggtgagcaatacgcaaaaagccttggaataaaaataaaattttttagaattatagttataataatatcaagccttcttacagctgttgtaactgccttcgcaggtcctattgcctttataggtcttgctgttcctcacatatcaaggcttatttttaaaacttcaaatacaatatttttaattccaggaactattcttcttggaggaataataacatcaatatgtgatgttatttcaagaactgtattttctccaacagagcttcccatcagtgctgtaacagcatttataggtgctcctattgtaatatttttaatactgaaaagggggactttttcatgattgtatttaaagctgaaaatttatctgttggttacaatggagttaaagctgttagcaatataaactttagtgccaaacagggagagataatatgtcttttaggtccaaatggtgcaggaaaaactacaattattagaactctttcaggacttcttcccccaattgaaggcgaaatacatataaatggaaaaagcctatcaaccataaataaaaaacttcttgcccaaacactttcagttgtattaaccgaaaagccatcatttgatgttatgacagccttcgacgtcgtttcacttggtcgatttcctcatactggtttctttggaactattactaaagaacatgaaataaaagtagtagaagccttaaaaactgttggtgctcttaatctcatagataaatactttcatatactaagtgatggagaaaggcaaaaagttatgcttgcaagggctctagtacaagaaccccaaattataattttagatgaacctacaactcatttggatataaatcataaaattgaacttttaaacacacttaaaaacttaagtcgtacagcaaaacttacagttatattatctcttcatgaaatagatttagctcttaagtactgcgacaaagttatgcttgttgaaaacaaaaaagttctttccttcggaagcccagaaactactgttaatggagaaactataaacaaactttatggtataaaaaatgcttcctttaaccccattacctcatctatagaacttaaaaattcagaaaaaagtaatatatatgttattggcggctgtggctttggaactcctatttacagacttttatcaaaatataatctaggcttctctacaggaattcttcacgaaaacgatattgactatgaaacagccaaaactatgtctttaaggcttcaaagtgaaaagccatttcaaaaaataagcaaaatatcttttgaaaaagctttagctgctgttgcttcttctgatataataatagattcaggctttcctattggtgaaacaaacgaaaagaaccttaatcttctaaattatgctgtagaaaaaaataagagggtaattactttcagaaaatattttaacagtactatgtcctattgcagtaataaggatgctttaatagattttatactgaggtgataacatgagtgataactataaattttttagacatgataattgcgaatattttccttgccataaagtaaaagataaggaaacttttaattgccttttttgctactgtccactatactttttagaaaattgtggaggtaataaaagtgattttaacggagtgaaggattgttcaaattgccttattcctcactctaaaaatggttatgactatattataaataagattcgtgaggtaaataaagaaaagagagctaagaataatttgacttaggaaataacatattatataatttagtaaaataagaaaatcatgcaactggcggaaatggagttcaccatagggagcatgattaatataagaatcgaccgcctgggtaaattaataatttatccaggtttttttgtatttaattttaggaggtatttaaatgaaagttccacaaatagaattaaaatatggatgtaaccctaatcaaagtccagctagaatttatgttaataaaggagtactgccaattgaggttttaaatggaaaaccaggctacataaactttatggatgcacttaattcctggcagcttgtaaaagaattaaaaaaagcaactggactaacctctgctgcttcctttaagcacgtgagcccagctggcgcagctactgctgttccactaagcgatactctaaaaaaatcctacctagtagaagatattgatttaactcctgctgcaattgcatattcgagagcaagaggcgctgacagaatgtcttcctatggtgactttgctgctataagcgataaagtagatgtagctacagcaactatattaaaaaaatccgtttctgatggaataatagcaccagactatgatccaaaagctctagaaatattaaaatcaaagaaaaatgggaaatataacataataaaaattgatcctgattatgaacctattaatcttgaaagaagggaaatatacggaataacctttgaacaaaagagaaacattactccgttaactgaaaatctacttgaaaatatagtaactaaaaataaaaatttaacaaaagaagccaaacgcgatcttataatttgcatgataactttaaagtatactcaatccaactccgtatgttttgctttagacggacaagttataggcgttggtgcaggtcagcaatcaaggattcactgcactaggcttgctgcttcaaaggctgacatatggtatttaagacaacatccttatgtactaactctaccttttaaggaaggagtatcaagaccagatagagacaacctaattgaccaataccttagggatgatgttacagaggctgaaacttttggctggagccgaattctaaaatcagttcctaaaaggctttcagcagaagaaaaaacaaactggctttcaaacttaaaaaacgtttctttaggttctgatgcattcttcccattcagcgataatatagacagagcctcaaaaagcggagtaaaatacattgttcaacctggtggttctatacgtgacgatattgttatagaagcttgtgataactacaatatgataatggcattttcaggtacaaggctatttcatcattagaatagaaattacgaagctttttagtttttccttaactgatttttacctcaactttaaaaaaccatatttatattaacataaatgtattcttgttcatataagatatacaggatacaatttttaaaggagaagtaaatatggataataaaaaaacctctatggaaaacaaaataagtgaagcatctgataccatatactatggagaatacgaaaaattaatagttaatatattgactgtaaaaaaaccaagtcctccaatccttgctatagatacaacaaataacgtagttacagtaacaaatgcaatagtagattcccctgtaaagaaaacctcttcaaattggaaaggtacccttcttttagatggatatatagataatactgtaacctatcggactgcttcgaatacttcttcaaataccataagcggaaatataaactttctgagcactagaatatattttcaaataagaccaacagttctctcccctactcagtttagtaaaaaatcaaatgtagaagtaatttctgcctatgttgaaagcgaaaaaaaagatttaatagaacaaaatgctcttccagaaaactaccccgcttgggccataacctacaataaactatctcaaaaaatattagttaaggttcaaataaaaatcacaagcactaaataacttgtccttactaaaggaaaaacagagttaaattgttaaaactctgtttttttctctatttttttaagccatatattttttttaattcctcaacatccatatccatcaattctttaatggagtatttactgctattttcaaattgtagaatttcctgtccttctactgttttagtctcattaaatctaattaatttttttatagaatattgaaatttaatttctccatatacttcaatactaattatatctctatgtcttttttcttcttcaactattattcttgatgatggttttaatgaaagcctagtaatatttccaattgtattagtattcgctttattacctaatatgtccaattcgggaataacaacacacaaatttttacttataaatcttcctctataactattttcttctcctctacagccatttcttttatatagtaaatatatatcataatatccataaatatatatacctacatctgaaacaattttagaatatatatttaaattttgaacttggctgtccattattaaatttttttcaaagttatcttcaatttttataatactagaaaaatttttagtaaacaccgccatttcaatcaaccctcttttttataattagttccaataatataaaattgtaattcataaaacattcctacaacaagaaggaccctagaatcttttacaaatcagaatttagaaatattcctacattatatattatttatattttttaatactgttactgcaattacctttttcttctatcgcaattttgtataaatcacctatcatttataaatataggtataataatgtgcttaagggcaatattctttattaatggttttattttagcgtttactttaatttatattaactaataattattgtcatataatactttttattgtattatatatatataatatatctataaaaaaattaggttttagatacaataacaatataatattacgaataaactatattttttgttcagaaataaaactatatattatggtaaatggagatgatttatatgaaaagcacaaaaattttaatcttgggtgcaggtcctgcaggattttcagctgcaaaagccgccttgggtaaatgtgatgatatcactatgataaatagtgagaagtacttaccttattacagacctcgtcttaatgaaattatcgcgaaaaataaatctatagacgatattctcataaagaagaatgattggtacgaaaaaaataatataaaagttataacttctgagttcgctacatcaattgacccaaataacaaacttgttaccctaaagtctggagaaaaaataaaatacgaaaagcttattattgcaagcggttctattgcaaacaaaattaaagttcctcacgctgacgaaatatttagcttatacagttacgatgacgctctaaaaataaaagatgagtgcaaaaataaaggtaaagcatttataattggtggaggtatcttaggtatagagcttgctcaggctattattgattctggaacccctgcttcaataggaataatactagaatatcctcttgaaagacagcttgacagagatggaggactattcttaaaagataaacttgaccgactcgggataaaaatatatacaaattcaaattttgaagaaatgggagatttaattagaagttcctgcgtaatcacagcagttggagttaaaccaaacctagattttataaaagatactgaaatagcttcaaaacgtggtattctagtcaatgatcatatggaaacatccattaaagatatctacgcttgcggtgacgttgctgaattttatggaaaaaatcctggtctaattaatatagctaacaagcaaggagaagtagctggtttaaatgcatgcggagaggatgcttcatattctgaaataataccttctcctatattaaaggtttctggtatttccattatatcctgcggagacatagagaacaataaaccttcaaaggtattcagatcaacacaagaagataaatacattgtatgtatgctaaaagaaaataaaattgatgctgcagctgttattggtgatgtaagccttggaacaaagcttaaaaaggcaattgattcttcaaaaagttttgataatatctcatctttagatgcaatattaaataatttatagattaatttaattatgaaaggggagattttttgtgccagctataaaaattaaagataatatattttctgttggagttctaaatcctagtctccgtatttttgacatcataatgaaaacagaatacggtacttcctataatgcttatctaattaaaggtaaaaaaaatgtacttatagatacagtacatggaagatttttcgatgaatatttagaaaatataaaaagtgtaatagacccttcctctattgactatgtaataatgaatcactgtgaacctgatcactctggctctcttgctagattgtacgaagtagcccctcagattaaagttattgcctcaaatgctggaaaaatatacctaaaaaatattacaaacaaagaaaccttagacgtaaaagcagtcaaaacaaatgatactttagacataggcaatggaaaggtcctaaagttcgccattgctccattccttcattggccggattcaatgtttacaattcttgaggaagacaaaatagccttcacctgtgatttccttggatgccacttctgtgaaccaagaatgtttgatacaaaaataacctatatgccgaaatatgagaaatcctttaaagagtactatgacgctattttttctccttttaaaccttatgtagtaaaaggacttgatattttggacgcattagatttagacttcatagctacaagccatggtccaatcctaacacgagaaggtctattagcggcatcaaaacaaaaatatagagacttaagttccgaaattcaaagtacaactaaatatatccctatattttactgtagtgcttatggtaatacggaaatattagctaatgaaattgcttccggaataaaaagcgtattaaatgatgctaatatagaaatgctagatataattaactatgattattcagatttaaaagaaaagattaatatttgtgatgcatttatgcttggaacacctactataaacaaagatgccctatttccaatatgggagcttattggaggcattgatgctgtaaactgcaaaaacaaacccgcttccgcttttggttcctttggatggagtggagaggctattcctttcgttatttcaagacttaaagaattaaaacttaaagtatttcaagatggttttacatgtttatttgttccatctgaggatgatattaaaaaagcctttaaatttggagaagactttgccaaaagtatatagcttattttgtgccatattaagtttgcataatgtggcacaaaataaactttattatggaggtatttgagatgaataacgatttatcaatttacgtatccaaaaattccggtactgccgttttactcctgcagggcaacggcactgacttaacctgcggatcagaaccaatggcaaaaatagttgcaaacaccactgacgcggctcaagagaagcatgtaccacatataaccaaaaacggtaacaacatagatgtttctgtaggttccgtagaacaccctatgacacctgaacactttattgaatggattattttagtttctggtgatagattggaaatggcaaaattaacaccagatatgaaaccaagagctcaatttcataatgttacaagtggaactgtttacgcttattgtaaccttcacagcctatggaaagcagatatataaatctgagctaatacatttatttaatagcagcctagccgcacttgtgctaagctgttatttcaacaataaaagtatagttaactatatgttcaaatttaatcttaagacctgaatcttctatatatgcttttaaactttcaatatctgtataatactcatcctcaattgtatcccatttgtctttctcctcattatcaatgaactgctgcctttttttcattttctcctctttacttaaaaacattaaatccgcaataattactttcccatttttcttaatatatttcaataaataccttatagctcttttcttctcatagcaatttaaatgatgaaaagcaaaagatgatatcacagcatcaaattcctcttcagcaaagggcttatcaagaaaatttcctattctaagatttatagctttgttcttcgttcttgctctaataagcatctctatactttgatctacacctgtatattcaattgaactgcttagcttttttactatatttgctgtaccacatccaaaatcaattaccttttttgcattcattccttttatttttttagctacattttcaagaacaagatcataactctcaaacaatccgaggctatccttattattatatacgtaatcatcataattcttagcccaagtatcaaactcccatttatctatccatgaatttatatttttttcactttcatatacacactcatctattttatcaaaaagtttctcgtagcttatatcattatttaatccagtatttatcccttctctaagcacttcttctatcttctttaattctaaaattctattttcaacagcctttaactgcatgtacaaaatattcacaactttgttgtcttcatattttcttttatccaatatatcctttatactttttaattttattccaatactttttaatacaacaacctgccttaatttaaaaaggtcatcctcactatagtttctataattattctcatctctatttggaactattatattaagctcctcatatagcctaagtgccttaggagaaatcttaagcttttcacatactttttttgtattcaaataaatcacctcaagaaaagtatagaccctgcccgataggcaaagtcaatatttctttattaaaaattatgtatttatattatattataacaaactatggcataaaataaaaaagtagtgtataattaataaaagaagttaattaataataattattgtcgaggaggaattattatgaaaaaaatctcaataatatattcaagccaaagtggaaatgtagaggtgttagcaaatgagatatacgaaggagcaaaagaagctggtgcagatgtaactataaaattagtgcatgaagcaagtaaggaagatgtactttcagctgatgccttagcttttggaagcccttcaaaaaataacaataatatcgatcaagaagatcttgcaccatttttaaaacaatttgaactcactcttaatgaaaacaaaccagttgtcttatttggttcttatggatgggataatggtgaattcatggaaaaatttaaagatttaatgaacgattatagctttaaagtaattggtgatatcgctgtaaatgaggcacctagtaaggaagaacttaaaaaatctagagaacttggaaaacttttagcaaaataatttgagtacatggatttgctataaaacaaatccatgtactcaaaatgttttaaaaaataaattttaataatgtatgccttattaatttattgctatatcccaaggagttacaatacccaaaattttttctttaactcttccagtttctgtaatgaatacaagtgaaagctttttctttccatgaattctcttcttaaacatatcttcaatttctacagctaaagtttttctagaaacaaaagcaaagaactcattttcatgtttatgcaaaggtataaattctttaaaatcattaattttcgtatctcttcttatttgaactccttcattttcaaccatatatgaaaaaacggtatttttgctaaaaactccaactatcatacccaaattatccacaactggtacattggcataattattgtccttcataaccgtcataacatctaaaacagactcattttgagttacaacataaatatttttaccctttacagctatagtgtctaaagcaagcgggggatttaaaattttatctctaagttcaccatacttaacaataattttatcatgtggctctgcaataggatctaattcagcattgtatggattatgaactatagaatttctaagtcttgcaaataacatcaattcatccttatattcctcaaatactttatttcttttagccatttttttcactaaatctgcgttaccggttctttcattttcatcaagtactttccgcatgtacctatctatttcattatatatcattataaatttttcggcatttgatttaatacttttatccattcatcatcccccctaccctatgatatgatttcaatctattaattttgaataaacggagctttgcatattactattttgtccttaaaatttttatcgtattctctttttaatagccttaatctctaattattctgaacagatttaaatctttctaaaattttctctacgctgtcatcatatttattagaatcaatactacatcttaacttatcaaagaaaggaatactatttttaataccttcctctaaatcatattctttcgaagcatcatcatatcccccttttatgttttcaaattttgttttattaaacacattactatctactaaataaaaatccgaatctacaaaaatactcttgcttctatttttaattaaattagagttttctatttcactcataaattcatatactctaccagccattttatttttgtctagttctcttccactattcactagaacatacaatctaatagtgaagtcacccttttgatttaaaatagtatccaaatcaaagcttccgttttcactagagttttcaagatcatttcttataaccacataatacttaaaatcattgaagttatttttcataattccttttagcctctctcttactaaaggagcaattaaataattatagtatccatcacaatatgaattagacactcctatcaagttatggtttctggtcattgtaaatgttttataaggattattttcaacatataaaacacatttatcatctacacccttaagtccgtgtgtaatccaattttgtccttctgaaacgctcctaaccttaaatttcatagagtatttattttcaacatactttttaaaatctttttgcatttcatcttttgattctcttctgcaaccgcacaaaaacattactacagctaaactcatacaaatgcatatttttctttttaatttatccaacctaaagaacctctttctaataatttgtaaaaacaatcttggttatatccttactatcagtaccatttttacacttaatgtacactgctttcttaactccttcgctctttagaatatcctttctatccttaaacctatataaatcagaatttatgctctcatagcaatttttaggaacaagaaaaaattcaaaggatatatttatatttttatttgagaatctattttcagtaactctactcacaaaattctttatttcttcagatatattatcctcatgcaaactagctccgtaattaataaagcttttcacagtaaccaaagtttcattttccttttcgaaaaagttttctatgtcaggaatttctttataatcataatctgaaacagataataaaccgtcatttccatgcgacgccacaacagaaaattttaaattactaaagtcatttccttctagcccttctattctctcctttatctgtggctcaatcaatctatacacatagccatctctgtatgaatatttctcctttttcacataaaatattttatttaagtcgttttgaggatacacagttaatccatcagagaatatattataatctttaacctttaaatacaaagaatatttatactcttcatgcttaactaacgcatatgatttatatctgctgaataataatatagctgctgcggctattaacattataattccagttactaatattcttttcttcatttttcctccataaatattatatttatttaaatttaattcaatattatcatattatatttcaatattctactaaaaaataatatgttattaaataaagcaaaaaaataagacacctcataactttgaagtatctatgtctaattaatattcatattattatttcgcaaatctactcaaattttttattaagcatctcacaaatttctcttagattctccttttgttcctttattccaagaacattctttttaagttcaaactcaagcataaattcattatcaaaatacattttaattgtatatccaaatcccaaaagccaattagatgttgttgcatattttatttgtttataactaatagctatagattttttaggctcctcttctccatctagcctaattataatcaatttcttatctgtaaatccaataatataattcctatcatcagcagttatcatgctgcctattttagcatttataataccataacaataatatagaacggaatcacttttctttaaacatggtgataatatttctgtaattgtatcatcattaattttcatagtttccctcctaattcatcttttgtctttagacctcatactgctgccagctttttaacaattgcttacaaaatacctcaagcaattaatattgtccactggcttttcttatcttttctttatagctataatctcttatagcctgcagcgtgcttgtccaaccttctggtgaaatttcctgttctttttttgttttgttaatgttatctaaatgcttatttactatgtttcccataacatattcgttcaagatatccaatttcactttttcttccatttgcaaatacaattccgcacacattaacttacttattctgtttaatcttttatttctactatccatttcaactttcctccgtacgagctatttttaaaaatctcatcacccttttatatacccgaaaggagttatatagcgtcatcccatataatctaactatatttacatttttctttgcactaattttaacaataagccagtgaatttttccctaatactggaattgatgcacataaaaataaagcctacaatataatttaaagctttattcgccatactatgcgctttgtcattaatagtttactacacgataaactaagatccagaatataatttaaatttaatcacgatttagataataaatatgcaataaggtattattttctcaccttatgtatataatactactttttatattgtttttccactttttttattataatttaatatataattaaaatatttttttaagttcttaacttaatcctttaaagaaatcttaaatttcacgtattaaagagctctaaatatataactacctataagcttatataaaaatattaagagaagccatttgacttctcttaatatttttatctgaattcctcaagaaaattttttattttatcaatttttatttcactataaactagtggtttttctttctttaaaaattctaaattctcgctgaactcttttttattctcgtccttgtatagaatacctataggaattttatctccccattccattgccttctccattgcttttattttatttgaaggatcatagttattatctaatttataaactctatccatataccatttaaaggtattaatcttattaaaacttacgcaaggctgaagtatatccactaaagaatatcctttatagtttatggcctgtttcattatctccttaagatgatttttatcaccgctaaatgctcttgcaacaaaaccagccccaagtgtaatagctaaaagtacaggatttaaaggtacattgttagaaccataaggttgaacttctgtaacatgcccaatatccgttgttggagaagcttgacctttagtaagaccataaatttgattatcatgaacaaactccgttatatcaacattccttcttatattatgaataaaatggtttcctccctcgccataggcatctccatctcctgtatcaattattactgttaaatccttatttgctattttagcaccaacagcaggaggaagtgcccttccatggagtccacagaaaccattagtatttatatattgtggcgttttagctgcttgccctattcctcctacaattaaaacttgatggggatttaacttaagctccgtaagggattcttttaaagaagaaagtatattaaaattcccgcacccttgacaccaagcagtttccaaagtacaaatttcacaattctccattttactcaccctcctttattcttcctactatatatgaagccataatgggccttccatcgtattttaaaatctttttgtcaacttctattccagtaccttctcttataatatctgcgagctgaccttgagcattttgttcaacatctattaatgtcttagcttttgaggctttttctcttaaaagcttttctggaagaggccaaacatctccaaatatgagagctgcatatttttcttttccctctttatttaaatcattaactgcctcttttattgctccttctaaagatccccaaccaataagaatattttctgctgcgtcttcaccaaaatactctggttcaattaattcctcttttaagtgtttcatttttctaattctcttatcgttcattaatactctggtttcagacgattctgttatatgtccatactcatcatgctcatcgctatccactaaaactgtcttaccttcaatatttcctggtattattctaggtgaaacacctgtctttgttacttcatatctcttatactctctattttccttaaaatcttcatcacttaaatacctatttactttaattttgtcaaaatcaaattctctaacagttctattgttatctgcaatatattgatcccctagtattattacaggtatttgatatttatctgcaatattaaaggctctcatagtttgatagaaagcatcttctgcattttttaatgctattaccatcttaggaacatctcctggtgatgaagatataacaaatttaagatctccctgctctgttctagttggaagccctgtagttggtcctggtctttgtatttctgcaaccacaagaggtacctcaagcatacttgaaaggccaatagcttcaaccattagtgcaaaacctcctcctgaagtacctgtcattgctcttgttccagtaaacgatgctccaattgccatattgattgcagctatttcatcctctgcctgttccactacaatacctgcttccttcattttggaagccaaatagtccattatactagttgatggtgtcataggataagctgaataaaatttacatcctgctgcaagtgcgcctaaagcaattgcctgatttgcatttattagaagcttatcatctttttcttttggctttatatcatacttaggtacaacttttttaaagccttcctcaaaagcattaaaattcttttgcgcaatatcctctttaaacctaacattaagaacatcaaaagcaaaggctaaatcctgattaaataatttcaataaagcacccaaagcaacactaccatataccctaacattacctattttatgagcaatatctcttaaaggtagagcataaactcttttatcttcatatttaatagaattatcacaaattacaaatccatctttctttaactcatttatatgaagttcaatggtacttagatcaagtgctattattccatcaatttcctttacatgggtacgtatttcttcatttccaaatctaatttgaaaaaaattatgtcctcctcttactcgtgacatgtaatcctgtgttgtaaatatctcaaaaccttttttctttaaaattttttgaagtatagctgctaaagtttccattccctgtcctgcagctcctccaatcaaaatattataaatcataattatccctccttatatgtgaaaggttattcatttttttccaaatattttttacatttccataatagcactttattctaaaattatcaatattaattattaaataatatttattattatttatcttttactccacaatattaaatatattataataattcatcgaaattccatataaattaaatctgcccaccttttcaatttaattgccctactgatttagaataagaagaattataattgggataatataatattgaattataaaataaaaatcataaattttaaggagtgatattcgatggatgaaaagagcaaaaaagtactagagaactataaagataagaaactcagtgcagaatttggtgaagaaatatcagatcttagaagtcagcttagcgccatggaatgtacattaaatcagcttaaatctagcggttccagtgtaagtggaagacaaagcttttacggtactcaaagccaaatgtctcaacaaggccaacaaggacaacaagctcagcaaagtcaacaaaccgcaacacaattaatgtctcaaattcaaaactttagacaacaagctcagcagcagcagcagcaaactcaacagcaattacaaaactctgttaaacaagcaatggatgctttaaatcaggtaaatcaacaaatagtatctaatgaagtatttggaaaaatgaatcagattatcaaccaagcacaggaacaattaaatataatggctatgggcgaacaacaaaacaagcaaaatcaaggtggttctacaagctatatgcaaaccaatatgcagaaaaatatgcaaagcactatgcaaagtggcagcatgcagtaaaaaacaaagtggacctgagtttaatcaagtccactttatttaactatttaaataggctgtagtatattcaatatatgtactactcttaacattatattccttttaaattaatgcatattcttcataatttcatttatatcttggttataactaagtccatcttctgatctcaaagtaaacgaatgatctacatagtttttagttgtattctcatttttatttaaccattcagagtccatcattgatctattatatctataagcaattgcttgagggtttgttttattataatactgagattttacaaaataaaatgaaacctctatatgcatatgtgtctttactaatttagtatcaactatctttttcataaatgaatatactttttgagcttcagtatttttatcaaaattatctccatgattcacaactgctataatatttatagttgaattattgccttgatccttaataaacgcatcatagtcaatcttacttgtataatcatctaagttttgatagtcctctgccgaaacatatgacgcacacttaatgtttgaagaatcattacctaatatattctttacttttttatctaccataggttctattaatctacacgaatagtcatcctcataagtgatttttgtatcagttcctatcttaaccctttcaactataaatggcttgcttttattatttgtcggatgagttattattttagaacgctctacttcttttccatcattagaattatagtatccatcaattacaaattgcattccatattttttctttaaataacttaaagccttgtcatccttagctgatgatttaacactgcatccacctaaaaccgctgcaaccaatgctattaatatggcacttagtatttttcccttcttcatttattctcctcctattttaccaatcaaagtttatttataatatctcttatgtcctgattgtagttaattccatcttctgattctaggttgcaatcatgatctatattatacttagagtagatattgatatcattctttgaataatcctgtccaagggcacttttagagtcattgtacgcacattcttttgcatttgctttagcaaaattcttggaatctacaaaatagaaagaggcttctacttgcattgggcttttcaccaacttattatcaattatttttttcatgaatgcatatatttgctgtgcttctgtattcttattaaagtcgtcaccataatttacaataacacttatattaattgttgaaattttaccttgatcctccacaaatttatcataatcaattgggtttatataattctcttttgtgcattcataaagcgatatgtacgaagcatatttaaagtttggaaaatcatttcctactgtagcttttatcttatcatctaccatgtgagaatatactctagatgcataattatcttcatatacgcttttagtatcataattatatttttctactaaaaatttatcctctggatttccctttggatgtgctatcatttttaatctgtctacttttttactactatggtaatatccatctactacaaattcctttttatatttcttttttaaatagttttgaacctgctctttacttacccctggtttaacacatccacctaaaactgctacaattgatactattaataaagcacttaatattcttctttttttcatttctcttgctcctaaatttattatttaattttattttcaatatctagtacatcctgattataattaattccacctttagactttaaatcaagaaaatgttgtactctatacttaaaattcacactttgagtattctcatgttcacccgtcatatagtcaccaaaatcgtatctattttttcttgcatttatctttttatagtctctttcatttaaatagtaaaacttagcttctaactccattggactttttatcaacttactgtcaattactttttttataaatgaatagctttcctctgcttccttgtgcttatcaaagcttttttcatagtttacaaaaatcacgatattcatatgagctacttgtccttcttttgctacaaactcatcataatctactttatttgtgtatttgccttttgttggtccataggttgtaatgtacgaagcatatttaaaatttggaaatcctattcctactgaattttttatctttttatctactataggttcaattaatctaagggcataatcatcttcataggtgtttacagttttgataacatccttaccattttcctttacatcctgaacctctttaactttatatactgtaaatctctttgttttgtcttcttttggataaaatatagcttttgaattatccttttttccttctccaatattgtaataatctttaaatacaaactttttcccatactttttttcaatgtaatttagcattacatctctattttttgtgcttatattaggaggctcttcaacttttcctttactgtatccaataagtgatagcaaaattaatactattgctaatatactctttctcatatattatctcctagttccttaaaaaattattttgactatccttaacgtaattatctttgaattttataatttaattaatcactataaattttcatttaaattcaacttaattgtataaaatcagctaactttaactaaataaactttatgtgattaagaaatatttttttaccacgaaggatataatatcacatttttagttatttttccatcttttttaaacaatttttatataggattaaagtttttgctaaatttagaattaggatatttttttcaacgttgtactttataaatctataataataaaagaatgttcaataaattttcttatcaaacatccctttaatctataattatttatgcagcaaattttcccctaagtatttggcaaatgttttgtagattttcgccctgtttttttattcccataacacgacgatttatgttaaattttacttttgaaccatcattaaattttaatttaattttctttccaaacacaaaaaacaaatttgatatttttgcactctttatatttgtatactctataacttctgatccttttaactttccagacatacccattctagtcattattaattttttgttagtaaatgttaataaatattgcttattagccaatcctgaaaaacttcctaaaagaaacatttgaagtctagttgctgttacaatgccgtaacaataatatgaagctaaatcatcttcgtccataaatggtgtaactatttcttttactttttcatcattaaatttcataataaatcctccaaaccttgctaaattccatttaacatattatcataatttaattaaaaaatctcttataaacttttaaaaaattttcttttttaagattatgatgtaatataaggtttgaatttggccaaaaactttttaaatttctcttaaatctttccactttaggttctaaacgggtagaccggtaaacccttcaatcaaagcttatatgtctttactataggatttttttgcataaaattaagcaagtatttttcacacctgcctacctatctacttataataatattttgtatttctctaagctgcgtttttaaagaagctataatatcagcctctttttctttctttgtaccggcatactctaaggtaaccacgtaaggctttgaatatgttaaaacccatctaagaagatcataatcctctttttccatagaactatgcgtatccataggaaatccttcttcatcatatcctgaaccattaacatgaatttctctaacacgttcaagtggaagtccatttagatattcgtgaacatctattttatgatatttcgaagttattttggcatgagttaaatcaagtaaaaaatcaacattattatctaaaaataattttgtaagttttttaggctgaaaatatggataacaatcaaatacggtatgttctattggggaatctggaacattttctagcaaaagaggaacttctatatttttcttgaaagtctgaatttgcttacacatatattcatatatattctcatctctcattccttcgtacatatccgaattttttatttcaagatgtattccaaaatgaggagaactgcaccttttaataatagaatttgcacgatcaaaatcaactaagttaatatccttcatacctgtgcgttcaaattttcccagcccatgtataagaattggtttcattgagcgcatagtagaaaattcattttcaaaatctccatacgcacctgctttaatataatctatcttaacctcatctttttctagaagaaatttcaaagcctttgaccaattacatccaatatacataactatatctccctttttcaataatatatactttttccttttatattatggtaaactataaattattatagcatatagtggaggtaatcctatgatttttaatagcctggtacctgagttatctgtaactaacatagtcatatcaaaaagcttttatgttgatatactctcctttaaagtccaatatgaaagagaagaagatagttttgccttcatttcacttaatggtgctcaactaatgcttgatgaaggtgctaatggaagctggagtacagctttgactacttatcctttcggaagaggaattaaccttcaattttttgtagaagatgtagaaaaaattataacttctttaaataaacacaatataaagctatttaaagatccatttattagcaattacagaataggtcctgaaaatcatactttcaaggaagttttagttcaagatcctgatggatatctcttaagattctcacaaaaaatttaaaataaattaaatactatcttattattttaaatttcattgaactataaacttttgcctttgcccaattttgtacatttcattttaagctggaaggcttgctatttctttaagatttaatttaagcttcttacagaggttattataaacatatccactctctaaattaagttactccactattattgaatacacaatactttttaaagcttctttatcaaagactctagcgtaatttaaaactatagaagcttccccttttttaattgcctttaaaatccatactgctttccctggagttcctaccgatcctgttctagatggcaaataaaagttcttatcaattctatatactttggaattatctaaagttaacctccatacatacccagttgatgaatttgcattcaatataatccaagttttttctccaagcttaactctattaatgccgtttgtaatgagtaatgttccatacccttcattatttgtcacatttttgcctccttatatttagtaataaattttacgaaaacctctaacactatctttaaatccaaccctctcataaaatttatgtgcaccttctctaaatccagaggatacaagaattgcatacgaacagttttttctatttgcaaattcatcaagagctttcatcaactttcttccaactccttttcctctaatttcctcttttacaattacgtcctcaatcaccaaaaatgggaacattaatcctttgcagcatattccaagtactgatcctatgatttcttcttctttttttgctgctaacaagagataattttcgtcctttaacatctcattatatacttcaagtgattttttgtgagaactttcaaatggggcaagtgtattataaagctttaaaagttgtggaatatcttctatccttaatttttctatgaccaaagttaaaacctcctttccaccttaataatttatcaactagagtgaaatcatttatttccgaaagcaatacatatattatacttcaattgaaaatttttacaaaacaattcatataaaaaatgttgatattatatattaaacggattaataacatacaatatcaacattttagtttattcttatttgtaatcagtaattcctaatctattcccaaaagtatcttcaaattccaaagccgtccctgtatttattttaaagggatctgataaaaagcttactcctctcttcttaagtatttcatatgtatccttaacatcttcaacacctagaaaaaagttatcataatccttcattttaaagctccctccaagcaggaagcttagacatcatttccctagcgatattttctgcagctttaacatcaaatccttgagttctaactataaattcagtcattcccttaagtttttcattataattttgcattgttccatcttctctagcacagtatttacagtaatctttactttcatcacctactgcaaaatctcctttgttattcattggcatgccacaagctatacaagttttcataatttatcccctttcattcattgactaattactcattgactatatgctcattataattttaatattttcctttgtcaataaaaacgagtgtattttaaaattaattgataatccaataacaaaaataatagaaactataaaaatttctatatgtaaattaaaacagcccttagttaattagctatgggctgtaaatttcaatatactatttttttattaactctataaaattatctactaattgatttttatatctatctataacagattctcctggtgcaaataattctctatttaataaataataatttacaagtcctatccaagtattaaaaataaagcttataggcagccttttatctttccctcatctatttctttttcagctacttcagttaaatgctttgaaagtgcagattgaatagacacaaaaacacttattgaatcctttggcagaagattcatctcactcacaagccttatataaaattcttcaaattcttttattccttcaaggtgagcacttaaaacttctctcatagttacagccttctctgaaacactatgcgtatgcataattattttactacagaacacctggattacctctcttaaaagctcctcctgtgttttaaaatgagcaaaaattgtgccgtgagacacacctgcagcttttgctatatctgaggttgtagtttttacaattcctttgtttttaaatttctcatacgcagcctctattatcttttttctagtttcttgtttttgaatttgtctctgtgataccttcatttcaccgtctccatactcactgattttatgctcattatattttatagatatatatatgtcaataatccattcttcacactatatagaactcagatttcatttaataagtgctataatatatatatcttttatcggggggtatactttcttatgattttcaaggaatttggtaataaaaatatgcctactatagtttttcttcatggtggaggcctttccttctggtcctttaaagaagaactatctgcattaaaaaatagctatagaattgttacacctattattgatggtcacggagaagactataataacacttttataagtataagtaactctgctaaacatgttatcaactatattcaagagagctgtaatggacatgtcttttgtatttgtggtctttctctcggtgctcagattcttgttgaagtattatctttaaagcataatatttcagaatatgctgttatagaaagtgcattagtttatcctataaaattatcacttaatttaatggttgcaatgaacagcctagcctatggacttataaaaaagaagtggtttgcaaagcttcaggctaaaaccttaaatgtacctcaagaattatttgaaacctactataaagaaagttcaaagatgacaaaagaaacattaataaatattacaaaaagcaatggatcttatccaatgcctaattctatatgtaacacaacggcaagtacacttatattagtaggagaaagggaactatctataatgaaaaagtctgctaaacttctcaatgaaaccatagataacagcatattaaacattataccaaaagctaagcatggcgaaataagtttagcttatccaaaacagtatttagacttattgaataagctttttaatagcaaaaagtaaggtatacttgacacaaaaaaatacatatgctatattgtgtgtaagatatagaggtgatgatttatgaaaaacagattaaaagaacttagagaagcctttggcttaactcaagaacagcttggaaatcttataggtgtatctagacaagccattaactccatagaaacagaaaagtgtgaaccttctatatggctagcttatgatatttctaaggtttttcataaatctatagaatatatttttctttttgaagaaagtgaaaaaaaatcaagagctaaacaaatcagaggtgttatataaatggcgttgagacaaattagactttcagaggatgaaatattaagaaaaaagagcagacctgttgaggtagttgatgataagataagacaaattttagatgacatgctggatacccttcaaaacacagaaaacggtgctgccatagctgctccacaggtaggaatattaaaacaactagttgtaatagctacaggagaagatatcataaagcttgttaatcctaaaatagtaaaaaaagaaggagaacaagaagttgtagagggctgcttaagtattccaaatgtatatggaaaacttaaaagacctaaaaaagtaacagttgaggctttaaacgaaaatggtgaaaaaatcactttaacaggagagggttttctagcaaaatgtttttgtcatgagatagatcatttagatggaattctttttacagacttagtaactgaatatataaaataatccccaaggaccgcataattcaatcaaattatgcggtttttctatatatgttttatttaattaatagtagtgctataattattatataaatttcctttattttcaacacttaatacatacctgaaaaataaacattaattccaagggggaataaccatgtttaaggaaatgagacgaaaagaaagagagcttagttttaaggaaactgaaaaaatactaaaaagctgtgaatatggtgttttatctaccataggtgaaaatgggtatccctatggtgtaccaataagctacgtatatttaaatggctttatttattttcacagtgccacagaaggacataaactagaaaatatagaaaataaccccaagctatgcttttctattgttggaaaaacctctgtactgcctgataagtttactacaaactatgaaagtgtagttgtatttggaactgccgaagaagtctttaatgaagagaaaaacgaggttcttttggagatattaaaaaaatactcctcttcttacatagaaaaaggcaaagtatacattaatacatcaagcataaaaactagagttataaaaataaacatagattacatttcaggtaaatcgagaaaatagcataaaagtggtatttaatatgccacttttatagtttctttttttctttttttagacttcttaatcggaagctcctcgtaagtttcatatacaagctttgctaaatactctctatcctctaaatcttcaattaaaaaagaaggtcttgcgccattataagcaggtgcctctactacttctttaagtaattctcttccaatctttgttaccttcaaaaaaaactgattatcacatactaatcctattatctttccattacagtatactccataatctccaaacatctttctataggttattttacctgcaccacttatttgttcactaacgtactccataaattcctcacttgaagccatttttctcacacctttctaaatgtataaaaacttaagaattattatccaaaacaccaagcttaattaaattcctgcaattattcaaaagatctcctggtgttacaaaatatgcttcatcctttatcattgcaccaattgatttagaaacgagtcccctgtcactattttctattaatttatctgccctactattattaaagaaatagtttaaaacactgcagaattcatgtactgtcaatacaaattcctccaagtaactcctccttgttataaatccaaagcatttatcttttttaaactccctataaatctcttttataataacctctctatctagcttttcaaaatgatttttactatttatttcacttatgtccttagtcaatttattttctaaagcagtactattttcatttatatatttctgaacctgctcaagtaaagttgttttctgaagcttattatcaataattaacttgtactcttctcccgcattttcataacagttaaaaataaattgtgaacataccatagggtgattatcatgatacactcccttgtctagtaatcttattatattactaattataatcttcatcattggtatcaaagttctttgaagattttcacctattatagccctcttaaaaagcataaatactgccccaaatattaatcctggttctgaatatggaactttatctataatatacttttcagcttcatttacaaccttggtcatatctttattataagaatttaatctcattacagtaattttcctatttcctactctacttcttatattattaacttgagcatttggtgctatttcctctgcaattttgctattatcatagtaggataaagctgaatgtgttaccggcgcatttgtgattaaagatattagtcttgattctaagctactataaagcggtgaaaataataatatatcgccttttttcaaatcacttatttttatatttttcatttaatcttctctcccatataaggctacatactattatattcttctaaatcctaaaaaactatatataaaattattataaaaaagaacccatataaataaatacttctataagtatctacgttataggttcatctcagcatcacttactactctaaagctgacttaagtttagagcattttttcaaactaacaactaaaaatatcaggtagagaataaaaaatataattccaattatgagcatagaattgtctacagtcatacttgcagaactatcacttgctgctgttctagctgaattttgcaaaaatgtaattagattattaagagcatgaagaaaaatagatggtattaaggatttatatttataagaaagcatagcaagacctaacgccaaaaagaaaattataggattaagtgtaagatgaagtacaaaaaaaattaatgaagatagaaaaatacctgcaattaatccatatttactgtacagtcttctaaaaagtattcctctgaatataaactcttctgctactggcgctgcaataactgttcctagaaatgatataactacgaaaaaaccgcttgataatattgttggtcttgactcaacatttgattgtacaccttttaatatgtgcgggtccaaggtagctattacataaaacattattaggatagctcccatagcacctaaataagttataatccacgtaaatggtacctctactataaaactctttttaggaaacttgccaaaaaaatcacttatttttattttatttacctttataaaaatcaaagccataagaaaccaaataactgtaactactagagcatacagctcattaacatcatctgttaaactaatattaaaaagcacgttaataaatgcaagtaatataccacttacaattgtaacggctgtcattgctataaataaatatctagtttttatatctttaaaaagtttaaaatccaagctaatccctcctaaaattttttcttatgtagaataaaaatctttattaattggacataaaagcattttctattttatcattacttcttgcttttttcaaagcaatttaaatattactgtatgaacgataattactttttccattttgttctacaagcctgaattttatgatttcaactaatctctaagagcagttcctaaaatttcataagaaagtttatctaaatagatagtaattggtcctagtattttttcattattagttttaaatgttactatataaacagctcttccttttaaaccctctttattatttttcaccaccttagcaacacttggattgaactttccctcagtaacctcagcattcttccaatcaacaatttctcctcctctatcccattcatatgctttaagccttgcaatatcataagaagaggttggtttgtaatttttaatttctaaacctttactctttttattatgtaaaagattaaaattatctctaccaaattctgctctttcatttactctattaaaattccacccgactataatacaaataatcatagaaaacaatactattgctaatgcctttctcaacataaacttcacctccttcaatttactccttccattctctttttagaattgaataaataagctgatcatatttatcttccttaataaaatagcgctctctaattctgccatctaagttaaaatcatacttttctaaaagttttatagacgcataattatttgaagctgtagtagcataaattttatttaagttaagagatttttcactaaatgccttattcaaaaatttatcaagcataatactcccaagtcccctttttctattaacttccggcaagtagtatccaatttcagcactacgatttcttgtgttaaaatcaaataaactaatctttcctaagggttcattactattctcttctattaaaacatatgttattttctttccttgttcagtactttttaagattttatctctatattcatcaaatgacttatactgttttactgggcgacaagtataatattcaaggtgcttttcacttctattccaatcaaataatctttttatatgctcctccttaagcaaatatagttcaattgagttaaacataaatcatcacactttcataaattgctctcatagtttaatatttctctaataaaatcattagcttcatttctctttttaaatattaaaattttcttatccttattttcattaataagtttaatattcttttctccatagttcttaggaaaatcccatatgtatttcacaaattccaaatcaaagttctctttgcagccttctgccatatcttccctaaccttatttaaatttattaaatatcttttaaaagctctaaaaaggcaaagtgttcttggaagacaaaagcacacaatagtatccgctcttctaagtcttatatctattgtggatccataattaccatcaataatccacttgtccatttttatgaattcctcctgcatctctatccatttttctttaggtgtttctatccaaccaaaattccaatactccttgtctaaatgaattaatggaagtgctaatatttcggaaatttttttagcaaaagtactttttccacttccaggagaacctattataattaccctatttcctatttgcttcatcacaaatcactactcaatacaataatatgatttcatttatatatcggcaccttattctaatatttaacataatagtctaatgatagtaagaaaatttatatttgtcaataaaaaataggatttcataaggaaatcctataccatgcttttacctaagtattttcacttctcctgtttcatgaaaatacttagccttaactatttcaatttcatcttttctcttaagctgtctaagattttcactttctaaaagcttatttgccgaagcttccacgtttttgtcctctataatatctatgatttctttacgtgtacactttttattattttcaagtgcattagctacaacattctctaaaggttctatgaaacctttaagcttttcattattacttactccctctaatgcagcttcaacagcaccgcatttttcatgccccattaccaaaacatattttgcccccaaatgattaacagcaaattctacattacctatagtgttactatcaacaatattacctgcattacgtacagtaaatatttcccctaaaccgaggtcaaaaataatttcaggaggaactcgagaatcagaacaggaaactacaactgccataggtctttgaccattttctttaaggtctttccttctcttttctgaaaaatctttaagcttaagcttatttgacatgaatcttttattaccttccataagagttttctctataactaaaaattcgtccttcactatcttacccccttaatatttgatttttatatattataaacaaagaaaatggaaaaatcaaactatttataaagccttatatcatctcacaatttaatttattaaccatactaactcaagatatttaaatttacgccgaaacctactaagtaatataaattttcagtactttttattgtctccaaaatacatataaattattgtaaaaaaatgatagtttcaatgcaagtaagctttttgcaatttaaaaataaatatcttaatactttaacacttatattttaaataaataggaggaatttttatgccgtggtttaaaaacaaagctaatatcaatactagtgattcaattgaggataccaccttaaaggaaagtgacaactcaaatataaataacataataaaggaaacaaccatcttaatcactaaaaagttaactgaacttatggatgccgaaaaagattttataaatacccttgacgaaactgatgcttcctataattcaactaatactagcattaatacagtatctacttcagtcaaagaatttaatagcagtatacaaaatcttgcggaaacttcaaaggtaattaaagattgcattcaaaatggaaagcctcttataaatcaaggtgaaaatagcattgtttctgtaaatactgaattcatatcaatagttgattttgtaaaatcctttgaaacaaatttcaaggaacttcaaagcaatatagagactattaattctttttcaaaaaagattattgagatatcagaacaaactgacatgttatccttaaatgcaagtattgaggcagctcgtgctggcgaagctggtagaggtttttcagtagttgctaatgaagttaaaaatttagctaatgagacaaaacatttatctaattctatagcttcaaacataaaaaatataagtgtctctgcttgtgatttaaataataatctaagcaacatcttaagcaaggtagaaaacggcgttagtgaaacaaataagtcccttaacattttttcaagcataaccgaatcaaataaggatattgatgaaaaaataaattatattaataatactttaactgagtctgcttcaaacatgaatgggataactgattctatctctctcgtttctaaaaaaagcacagaaaatataacttcagttagtacacttcatcaaaaaggaaccataaaaatagattatcttactgatattctaggtctcttggaaaaattagagtatgaaataaataataaataaacactctaaagaataaagtaagttgtttatctctccttaaacacttactttattctttataaattttctttttatctctagaaaatattccaagtcatttaggaactgaaaaagcagtgccctattttcaaattcttctcttgtctctggaagcttttgctctttaaaagttttgaaaagctctcttaaatcttcaataagtgtatctacaggattttcctcatgaagctgttctcctatcttttcagttatgtctgccactaatttcgtctgctcaaagctcatataaaacttggtgaagtgatttctcatatattttaaaatttcgaattgcatgtttcgcatttccatatacataacatagtatttatccgaaactattatattattattgaggtttctgtatgccctctcgcttccacttttgattgccttagagagttcactaaaaagagacaaattttctgtttgtatggcttctcctctaagctccctcgccatatttaaaagtatttttttcatgagattctctatctcaatttgattttcctttattctcttatcaattttgggcatatatgtatttaagagtattgctataccggctccaactaccatcaataagagctcattcttaagccaaaatactgatatagttttttcgactaaaatatgcgtaactagtacagaactaactgcaattccctctgtaagcttaaataggactgtaaggggaataaatattgctaaatatactccaaagcttattggattatagccaaaaatcataaatattatgcagcttataataagtgccagtaaagttgatgctagcctttgaaaagctataattatggaagtcttttttgtattttgaacacttagtatcgttatgattccagctgctgctgcatactttaatcctaagaattctgcaattataatggctatagccgctcctaaagccgtttttaaagttctaagtccaataatcctcatatactctcctttctaaaatatttatttactattatacactaaatattaaactaaaaaggtataatagtaaaacttgacttcgcattagtactttttacaaatataaaagcagtcagtaagggggaacaaactgactgcctatatatttaattattcactttattgattactataattatatattacactaataatgttacacccacgttacaataataagtacaatatattaattttatttcagtaagaaaaatagcacctcataaactcaacttaaatggaatatacaatattaatgctacaaaaaaagttataatttcagttatggtcatagaccaaatgaccccatccaatccaaagaaatgatgcaataaaataattactggaatgtaaagcatcccttgagtgacagccataattgtacttgaaattcctttacccgaagcttgaaaaattcctgtgaacaaacctgtagttccgttaaacatagacgaaataagcatagcaagcattatatacccaccaatcttcataactgaaggatctttagaaaagaaatgcaatacttctactctaaaaacatatacaattcctccaaatatagccgataaaattacaataaataaaactgaggtctttataccttctgttaatcttgcgaaatttttctttgagaaattatatgctattagcggcataactcccatcattacacccatggaaagaaattcgggcacttgaacaatccttagggcaataccaaaacctgcaactacactatcaccatatccaattgaaaaattgttcaaaagaagtgttgtaataattagaaaaaaagacataagtaattcggaaatccctattttatatatttccattttatttttaattgagatcttaaaatatcccataaagcctcttaatttttcacttttcttatccaaatagtaaatataataaatggatgaccctagatttgccaaaagcattgctgctgccgcgccaactacattaagcttaaaaacaagtataaataacggatcaaaaataaaatttaaagctgtgctaacaaacatcccatacatagactcctttgaagcgccctcagctctcaccatttgttccaaagcaaaattcaatattacagcaaagcctcctaaaaacatagttaaagcataattctttgtgtaactgctagacaatgaatctgcccctagtatcttaacaataggattaataaatactacagcagctacagcaataattactcctgctatcatactactgtaaaaggtatatccagctgcacttttggcttcattcaccttattttttgcaataagtcgggtaataaaattccctccacctactccaaacatatttccaaaagccattagtatagtaaagattggaagccctagcgtaacagctgtaagcatattggtattatgcataagtccaataaaaaaagcatttataacattgtatattgtacctacagacataccaatcatcattggaactgaaagactgaaaactgcctttcttattggtgccttctctaaataatattcatttgacgattccattctatctctcctccacaaattattagccatctaactattagaattctaacgtttcacctatacttacctaaatagaatatcatttaaaaattacatacttctatttacttttatgagtattgacataagttgcttctgctcatccttagttaaacccttagtaatactttcttcaacctctaaaaatatattattaaattcctctactaatgcagcccctttaggaagcacataaatatttttttgtcttgcattattttctggaattctcctctctatgtatccttttttctcaaggccctgaagcatacttgtgatactagctcctctcctcccaaaaaactgtgctaaatctttttgaataatacctgattcttgattttcatatatatatcctatcatacgtccctgctgggagttaagccctaattcagctaatctcgcatcagcacttgtttttagcttcatacctatacttctaataaggtaagaatatggtgtatccattaaatgatttgactctttcattgtaatcctcccataagatacttagaactctaattatttatagtataatagttagaactttaagtgtcaagtattattttatttgctttgcaaatttatgtatagtataattatcaataaacaatttaggaggtcgtatatgaaattattaaagccatctataaaatacaaaaatcaagttttagagtataaaaaagaatttataaaaaatcacgatacattagcaggcacatcttatctagctgattatgattcttatgaagattggatgaaatttgtactagataatgaaaaagaaaatacaaaacatactggtgtgcctgctcatatgtatttggctgtaagggaagctgatgataaattagttggtatgataaatatcagacatacattaaatgaatatttatataactacggtggtcatattggatatagtgtaaaaagagatgaacgcagaaaaggttatgctaaagaaatgcttaaaatggctcttaaagaatgtaaaaagctgaaaattagcaaagttttagtaacctgtgactcaaataacattgcttctgcaaaaaccataaaatcctgtggcggaatactagaaaatgagattcttgacggtgacaaattagttcaaagatattggattgaaccttaaaaattattcttacagaagtttcaaaatctatttttgtaaaaatatataagattcaagctggctatatgtactttttctccaaatcctctaaaagctttatgtatttttcctgaaccttatttttgctctctatttcctcaaacttctcacattcactgttaatcttatctaaggtttctcttgaaagattttttgaagcaaaagtatacactgtgctatcttccttttcaatgtgtctttttaaaagattttcatacgacactgcatttgctataacatccaccttggaatcatcgtcaccgtttttaaccctttttaaagcttcctctaagtcataaataaagcttcttccttgattgtgctcaactaacatccccatatttataaccttttctattggatttcctaattcatctaccattttgttaaaaagcatattttcttctttaccatggtgatgtttatcggcatagtttcttataaaatcaatcattttataaaaatcgtcataatcaatttttccaccatttaaaatgttaatactagcgttcctaactactataagcattctttttatataagtatgctcttctaccattaaattaatgctatccaaagtttagccccctttttatattattatatccacatacgtatatattataagttaaatttttattcctaaataaagagctaggtaatatacttttatatcacctagcttcgcattgagtctcttttattaccaaggcaaatctggaaatgcagataataatgaattgccaaaaaacgttgcacccaaaaacaatattcctaatgctagtactgttaataaaaatttatgccttttgaaaaacacaattctcacatcctttatttttataattaaacttatctttagtttggtgtaaaaatccagttctataatttatccttaataaaatcctcactaaatttacatatctcattaatactttgaaaatcagagatatttgtatagtattttatcatttttaacataagtctactgttaatctgatcaagcttacttgtaaccaagaaaaattccttcttaagttcggagatcttctctttattatatatatcaattaattccaatagaatatcctcaattacaaaataatatttaaatttcttagcatattctaacgcctttaggtaatattccttagcattgtttaaatcctttaattgagaaaatctgctgcctaattcaaaatatatattgggaaccttaggatgagtttcatccaaattaacaatacttctttctgctgtttttaagtactctaaagccttttcattgtctgaaagattaacgtaaatttcagcgatattgagaagtataattacactattttcataatcatttttccctgcaaaacgtatgagaagcttgttatagatatcaagactttcatcatatttctctaaatactgtaggcaaacagccttatgaatcaaagctctatagtacttttcactgcctttttcaagcatattttcaatcttttctagtctttttaaggatttatcatactgctttaattttgtatagcacaaagcactattatataagaatattgcagtgtattcttcatccatgtcctcaaatctatccaaagcaaattcacaacacttaatatcatattcgtactttcccatataaaaataaaccatagataactttctaaatataggaactacatcatgagaaggcatgttaatattgattagtgatcttgccttttcataatatactgcactcttataaaaatcgtttgaattacaaaaataatctcctgctaaggtatatatagatatttttttatcctcaaagctccatttgactaaaaagttttctgcctcatttagtttatttacaaaacttgcatctttatatacgctcaaatctttaagctcatttatatatatatctagtattttttcagcctgtaatctttcatcttctaagagatattctatatcctcttgaaaaggcatctctctttcttcacaaattctttttaagtttctcatcattacttcagccgatttcctagtaagctttgccttgttatgctcaatttgacttataaggtttcttgttatttcatttcccgctagatcatcttgatttaatttatactttttccttaagctcttaagcttatcacctacagacagtatttcataacttgccatagcactttctcccttatcataaacatactttcttcgacaattgtaccactattagtctatatgttaataataatcgtatttttttacaaattcttaattattttttttgaaaaattcttgaaaaccataatttataaagcttatataaattatttggaaaaattttccaataagcatgcttagttttatgctatgtaaacttccataataagcatattatattctgcgtctttttacacataatgtaaatattagatttaaacatttgcttttaattaaaatattatatataattgagtgaatataactttcaaacaaagttcatatatacttggaggtttaaaatgatttatagaaaagcgacagaaaaagatattgctcaacttgttgaacttagaaaaaaacaattagaggatgaaggaattgctccaattaataatattgatacggaattaactcatttttttgaattaagtttcaaaaaaaattcttttatttcatggatttcagaagaggataatgaaattattgcaacaagtggagtatgcttttataaatacccaccttcctatttaaatcccagtggaaaggttgcatatataactaatatgtatacaaaatatgagtatcgttcaagaggaattgctcttgctttattaaaacttgtgatacttgaagcaaagaaaagagactacttatttcttcgccttcatgcctctgatatgggaagacctatatatgaagaaataggctttaaaccttttgacgatttcatggaaatgaatttatcacttaaccgtaacggggaataaatatgcttaagggaagctaaagtttacttcccttacattttactaatgaagaaccatccttggagcaataataataaaaacaagttgaaaaataactaaaattgagtttattataagtccacatatacctggtatatttttattttttataatagaaacagcagataatataactcctattggtgacacatatactggaattaataatgggattcctccaagattaaaaaacggtataaacttaagaaatacatttaaaattaatattatacttaaaactgctataattaaagataattttcctaacactttttttagttttcttaaaaccataataactccttttagttaaaattctggatctgttaaattagttacagaggaccaatccgaattaaattctgcttgactatttgaatcagttatccactcatttggagatacacttaaaacatcattcccattggcatcaattcttaaagctttaaagaaccaatttccagcaaaagaccctgtactattttttctaacccacaccttgtccaccattgtaggaagaaaatccatatcatttatatataaatagtattcgtcagtggcaccattttcaaaatcattatatgtttctttatccaaaagccattcctttttttgtccattatttagatgtataccaaaataaatatcgtcatctgttcctgaacccaaattcgttcctgtgctaattattgttgtaagtgaacttattggagaactacttttgcctacatctagattccacctatcagtaaatttactataatcaccgttttcagaatatgtaagcaatttatagcattgatttattccttggctaaatgacgcattaaggcgctgttctctactatttattgataaaaactgctttgattcattataatcagtataactatagccaactcccgttctaagtcctgttaaaagagttgaagcccataacttttcttcagctgtagaaggactttgtccataaacttccttagatgtctcattcattaaatcaaatggtatatcatctgtacccttaaaaacgttatttgacatattattcgaattgtaatcatttatagaatgtcctgctatgtttacccacgcatatggctctgcctcagcctccatatgtttatgctgctttcttccatccttattatcaagatacactccacattcaggatttacataaatcccgtgacaagctaaatctccagtaacatgtgatatccaaccagctgcaaaagctattttcttcatatcccttgtttcaagtgcatttttgagctgcttagctgcataagttccaaccttataataatgatatctatcgccccagggagaatagtctccaagttccccaacttgcatataccctaagtctggtcctacacttccccatgctgcaacattgggataggcttctattgctttccttattatgctatcattagacatcttactttctgcttgttcaataacaacataatgtgatactggttgaaatgcttttactctaatgtcaaacataattgaaattcctaacggaattaatagaactaaacacttattctttattctcactgcaaaaatctccctcatcttactttattattcaataattcagtttagttctttatatcactttcttactttatttgtcaacaaactattttgcttgttttttaacctatatttaacaaaatagaaagcagctgataggatagctgcctaaatcaatataactagtactttctatgataaaaaacaacacataaaaagtatactaatggcataaaaaacaaggttataattaaaaatctatctattgatagtgaaataacgttttttaaaattacaatcgcaattatataataataagaaatccaaaaagccttctgtcctgattttgtatttataaatacatttctttcttcattctccagttctacattcttcatcatatctattcttttctcacttagcttatacactacaaaacttcctaatcctaccggaatgcatccaagagcgatgccaaacataagttttttttcatatcctaaaaaaaatcctatccccaaagctgctattcccactaaaataaacatacatgaatatatattttgtttttttatataatttgataaatccatagtaacaactccttaaagttattttatcttaataaattcccgttatgctgttattagtcctcaaatatgaagacattttcaattgtaagttcaaaactttttgcaatcttgtgtgccaaaaatatggaaggattgtacctctcattttcaagagatataatagtttgtcttgatacacttactctctctgctaattcctgttgtgtaagcccaaattgttctctgagttttcgtatattatttttcaccttagttcccctttcatgtaaagctacctttacattactattatattaatattttcacttagcatcaagcttactttacattaaagtattaacttatggtaaaattataatataattgtaaaaaacttttggaggtttaaatatgaaaattgatagcattatttttgatttagatggaactctatggaattctatagaaggagtttgtgaagcctggaaagttgtccttaaaagacattcaaatataaataaaataattactccaaaggacataaaagctagtatggggcttcagatagatgaaattggaaagcttttatttcctgaagaagacgaaaaaatgcagcttcaattaatgaatgaatgctgtgatgaagaaaagttatatttaggagaacatggtggaaaattattcgccaagcttgaacccacactaaacaagttatctcaaaagtataaactcttcattgtaagtaattgtgaggatggttatatacagagtttctttaaagctcatggacttaataaatacttcactgacttcgaatgttcaggagttacaggactatctaaaggagaaaataataaattgataataaaaagaaattctttaaaaaacccggtatacgttggtgatactctaaaagattttgaatcagccaaaatagccaatattccttttgtatatgcaagatatggctttggtgatgttaatgagtatgattatgtaattgacagttttgaagaaatgttaaccttagacttatagttttacttatacatgcagccaaatgtcttcagttggcatttagctacattgcggttaagtttaaaatatattaccccataatttaattgcaaataagttttgaaatatcagaattgagttcataataccaattgtctatattattaataataaacttatttatatccttataatatgtaattttaacataggaaccatccttatagcatatagtgatttcttttccatttagattaccgctagtctttaatcctaaattatgaggagttgaactttcaagaattttcaaaatcttttccttcaaacttccactcattattgtaatcttgctatttccttgtctatcatttacatctgatacttcaacatcgctaacatcctttaattctaattttgatggatctatattttcaggtttaggagataaattctcatccaatgaggttacaccgcaaacttgtccatagactcttaaataagctcctactatagtatcctttttatacaaaataactgcttcaatatccctcttatccattggctgggatttttcatatactttatagctaacttctctaaccctctccccttcatatttttcaagattaaacccgcttaattttgatgcagtattatatatattgaatttgtaagtacttttattaggaagcctataatatttaccttttccttcatgctctattctaaaaccatattttgtaagcaaactattaacttgtcccctattttcttgcgattttacttgattaaatgaaagtagtactattattgttgttaaaaacacagctgctaacgctatcttcttttttctattcatctcaaaaccctctcaaagcatagtaagtaatattttttactatattatagcatatttaatttaatggtaatataaagtttttatgaatttcttaataagctattaatatctacacaataaatctcataagcacttaaataatattctttagcatattcaatttctaataagtatataagctaataaaagtatccttaattctataagtgtttaagtaaaatatttaagttatctttgatacgtaatctatttccttataatcgataacattgatttttttacaatgaagccactacaaaactaacctacggtgtagcaagcagaacaaaaaactgatggaacatatttggttcactcctgatactcggtgtaaagatttttcttcctcatgcatgtatgagaaagaaaaaattgcacatactactattcgagtatgatatctagttagctaaaaatgctcagtaagctttaaaagattgacctatacttgaaggtcaaatgactatggatctacaacaagatcaaaaactatctattgtaaatttgtaatacctcagcataatagttaaattattaaataaaagcatcgtagagtcttatattaagataatacgatgtttttatctatataattaatattaaataaaattaaagtagaatcgctgcattaaattttactgatgatattttaccaatccataaagatacatatccttctctttccatatacttattctactcctttactttattctaaaccattctggcaaatgataaactccatcatcacccagttaatctacatatctttattacattggatgatatttaaaaattagatttattcagtgtttccacttttgctaagtataataaaatactattattgctttactcagtaaaattaaatttatcatacataattcataagataataggaaaacttactactaataaccaaaaaaaatttaaggagtgagttttcttatgagtgaaaccatatcagaaaagtcagagggaagggtaagctaccatgattctgtagaagaaatggtaaaaaaaattagagaagatggaatgtctaatgtttttgatagatatgcccttcaagagaaaatacgatgtaagttttgtctagaaggtttaagctgtcagctttgctctaatggtccttgtagaataagtgaaaaaacaggccaagagaaaggagtttgcggtataggcccagatgcaatggcaatgagaaattttcttctaaaaaatataatgggtgctggtacatatagccatcatgcttatgaagcctatagaaccttaaaggctactgctgaaggaagaacaccttttaaaataacagatgaaaacaaacttaaatggatgtgtgaaaagcttggcattgatacagctcaatctataaacgatatggcctttgagcttgctgtaatccttgaggatcaacaaagaattggagttgaagatcaaaatgttatggttgaggcctttgctccaaagaaaagaatagaagcttggaaaaaactaggcatatatcctgctggaacagttcatgaagagcaaaactgtgttgcaagctgccttacaaacgtagatggaagtcatatatctcttgctatgaaagccttaagacttggaatagctacaatatataacactcaaataggtcttgaaatggttcaggatatattgtttggaacaccaacacctcatgaagttaatatggatttaggcataatggatcctgaatatgtcaacatagtattcaatggtcatcaaccttggataggtgctgccactattttaaaagccaaaactcctgaaattcaagatatggcaaagcaggctggtgctaaaggtttaagggttgtaggttccatcgaaacaggtcaagagcttctacaaagattccctgttgacgaagtatttgtaggtcatatgggaaattggcttgcaatagaaccccttttagctacaggtactgttgatatatttgcaatggaagaaaactgctctcctccagctattgatatgtatgctgaaaaatatcaagtaaccttggcagctgtaagtactattatagatttgcctggagttaattataaatttccatacgatcctgcacaagctgatgaaacagcacaaagattaattgaactcggaatagaaaactttaaaaagagaaaagaaagacagataaaacctcacgttcctcaaaaaatacaaaaggctatagctggattctctaccgaagcagttcttggagctcttggcaacaaacttgatccactagttgatgtaatagctaagggtcagattaagggagttgttgctcttgctaactgttcaactttacgaaatggtcctcaagattgggtaacaattaaccttacaaaggaacttattaaaagagatattttagttgtaagcggcggctgtggtaatcatgctcttgaggttgcaggactttgtactctcgatgctgcaaataatattgctggtaatggtctaaaagcagtttgtaatgcacttaagatacctcctgttttaagttttggaacctgcacagatacaggaagaatttctatgcttgttacagcattagctgaacacttaaacgtagatgttccacaacttcctattgcagtaacagctcctgagtggatggaacagaaagctactatagacggtatttttgctttagcttatggtgcctacactcatttatcacctactccttttatgactggagctagacagctagttgatttacttactaataaagctgaggatgtaactggaggtaaaatagctcttggcgatgaccctatgaaggttgcaaatgacattgaggatcacataatgagaaaaaggaaagaattaggtttaagctaagtctatgaattcaattaatatacttagcaaatactaaatacagggtttacattgttaacccgtatattctaaaaatatttattttctacaaggaggaataaagtatggcaaaaaagttgaaaaccatggatggaaatgaagctgcagcttacgcttcttatgcctttacagatgtagctgcaatttatcctataacaccatccactccaatggcagagctagttgataactggtcatctcatggaagaaaaaacatcttcgggcagcctgttaaaatagttgaaatgcaatcagaggctggtgcagctggaactgttcacggttccttgattgcaggtgcacttacaactacatacactgcttctcaaggtcttcttttaatgataccaaacatgtataaaatggctggagaacttctaccctgcgtattccatgtaagtgctcgtgctattgcaactcacgctttatctatatttggagaccatcaggacgtcatggctgcaagacaaacaggttttgttctcttagcctcttcaaacgttcaagaggtcatggatttagctatggtatcacacttagctgctattaaagcaagagtgccattcatgcacttctttgacggttttagaacatcacatgaatatcaaaaaatagaaatgattgattacaatgatgtagctcctctagttgactacgaatcaattaaggcttttaggtctagagctcttaacccagaacatcctactgttcgtggtacagctcaaaatcctgatatctacttccagggcagagaagcttcaaacaatttctacactgcagttcctgatatcgtagaaagctatatgagagaaatagaaaagataactggaagagtatatcatccttttgattactatggcgaccctgaagcagaggatataattattgccatgggttcagtttgtgatacagttgaggaaactgtagattatttaaggagtaagggacaaaaagttggattgttgaaggttcatttatatagaccattctctactgactacttctttaaatatcttcctaaaactattaaaagaattgcagttctagacagaacaaaggaacctggttcagccggagaacctctttatctagatgtagttaatgccttttataaccatccaaataaacctgtcatagttggaggacgttttggtttaggttctaaagacacacgaccatcacaaattttatctgtatttgataacttaagagctcaaagccctaaaaatagatttaccattggaattgtggatgatgtttcaaatacatctctacctgaaggtgaaataatcgatactacacctcaaggaactataagatgtaaattctatggtttaggctctgatggtacagttggtgcaaacaaaagtgctataaaaatcataggtgataataccgatatgtactgtcaggcttacttctcctatgacagtaaaaagtctggaggaagtactgtttctcacttaagattcggaaataaacctattaaatccccttatcttgtttatgaagcagactacattgcctgccacaataaatcctttatatataatataaatgtgttaaaaggattaaagaagaacggaatttttgttctcaactgtccatttaaagataacgaacttgatgaacatcttcctaatgcaatgaaaaaatatattgcagacaacaacatacaattttacaccatagacgcagtttcaatagctcaagaggtaggtcttggttctagaataaacatgattatgcagtctgctttctttaaactagctaacataataccagtggataaggctgttcagtatttgaaagattctatagaatacacttacggtaaaaaaggtgctactatagttgatgcaaataaaaaagctgtagatgccggagttaacgcagctcacaaagttactgttcctgaagcctggaaaaatgctgaatccaactatcaacctttaaaaggtcttcccgatttcgttcaaagaattgaaagacctatggcaaggcatgaaggtgacgaactacctgtaagtgcttttaaaggcatggaagatggtgtatttcctcttggtataaccgcttatgaaaagcgtggaattgcagttaacgtcccagaatggcaaatagacaaatgtattcaatgtaaccagtgtgcatatgtttgtcctcacagtgtaataagagcttgtttacttgatgatgaggaaaaagaaaatgctcctgaaagattcgttaccaagaagcctgtaggtaaaggcctcgaacacctacactacaaaatccaaataagtccacttgactgtactggttgcggaaattgtgcggatatatgtcctgctccaggtaaagctttaattatgaagcctgctgcagaacaaatagaagaacaatcagaaaacttcgaatatgccttaaaggtaaaacctaaggaaggtataatggatattcatactgtaaagggaagtcaattttctagaccacttctagaatttaacggagcttgtcccggctgtggtgaaacaccttatattaaactattaacacagctttatggagatagaatgatgatagcaaacgctactggatgctcatctatttggggtgcaagtgcaccttcaattgcatacaccacaaataacttcggaaaaggtccttcttggggtaactcattatttgaggataatgcagagtacggttacggaatgtttttaggcgttaagcaaatgagagaaagattggctgaactaatggaagaagctattaattcaaatataaattctgatcttaaggatgcttttagcttgtggctagatggctttgatgacggcgataaatccaaggaagcatcaaataaaatccttagaatcatggaaaacgaggacttcaagggtgataaattattatctgaaatatatgataagaaagattatttagttaagaaatcccactggttaattggaggagacggttgggcatatgatataggcttcggcggagtagatcaagtgcttgctttaggtgatgatgtaaatatatttgtaatggatactgaaatatactctaatactggtggtcaatcctcaaaatccacaccaactggagcaattgcaaaattcgcttcagcaggtaaaaaaacacgaaaaaaagatcttggcttaatggctatgacttatggaaatgtctatgtaactcaaatagctatgggagcaaacatgacccacactattaaagcaattactgaagccgaagcctacaaaggtccttctttagtaatagcttatgcaccatgtataagccacggtattaaaactggtatgggcaccagcatagctcaagagaaaaaagctgttgaagcaggatactggcatttatacagatacaatcctcttctaaaagagcagggaaaaaatccatttatacttgattcaaaagagccaacagaatcctatacagactttataaatggagaacttcgttactcttcacttaagactatcttccctgataaggttgaagatgcatttaataagtcagcagaaaatgcaaaggaaagatactctctttataaaaaattatcagaattacagtaaaaataggaggctaaatgcctcctattttactgtaattacaaatagttttttcatacctttcctccacaaatattttcttaactatttttcttcattatttacaagccttatcaggttgtctttatgtctaagtatcaataaaccgcaagctattattgcacaaactgttatttcaattggtaatcttagagcaatgcatgcgattggcattgttatgcctacagcaattgacttaattgatactatttttgtgaacaaacgcagtacaaaataaactacagctccagccaatactgctgctggcgcaagcaaaaaaaatgcaccaaccgttgtatttacacccttacctccattaaagcccagaaacggagtgtaatcatgtcccaaaattactgctattacaataatagaaagatacatacttgttgatattggtaattttattttactagctattaacatacataaaagaacaggaattatcccctttaaaatatccattacttgagtaatcattgatattttagttcctgcaactcttttaacatttgtagaacctatatttccactgcccttagttcttacatcaattccactaagctttttggtaatcaagtatcctgttggtattgacccacacaaaaaagaaaccataactgtaattattacaataatcatctatatctccttaaaataattttttctcaatataatttaatatatattacactatactcccaattatttatactattataacacaaactaactcagatgcatttacttaacaaatcttttcttacacttgctatattgagcataatcaaataaaatagtatagtaatctttaaacatgaaaaggtgaaaataattatgaatagtatattaagttcttttaagaaaaatcaaaagggtattatattaatactcatagcttcaatatgcacaacaatcggacagactttgtggaaaatgtctgctatgcacaatatgctttacatactaattggttttttcttctacggtataggtgctgtgggcatgataattgccttaaaatacggaagcttttctgtaatacacccaatgatgagcatgggatatgtatttacaataatagtatcttatattcttttgaaggaatccgttggtcttggaaaaataataggtgtaatattgattatgttcggtgttgcatttataggtttaggtgatgaatgatgaataacgtaatgcttatattagtaattattataatgacactgcttggatctttcggaggtttttgctttaaaaaatccacttccggaggtacaatagcatctattcttacaaacaagtttttgtatattggaggatttttgtatgtaagtgctgctgttacaaatatttatgctctaaagtatatgcctctatctgtggttatgccaatgtcttcaattacatacatatggtctatgattatttcaagaattgtgcttcatgaaaaaataacaaaattcaagattaccggactagctcttatactagttggtgtaatttttgttggactttcctagtttttaatgagtataagtattctctcttatactcatttttatttaagattaataaatcccttaaggtacgtattctatgtatactgcaattcatcagcttcattattaataaaattttgcataaaaatcaaggtaatcactcctccagattgccaacctaagtccattatctctggaagctttcttgaaaaaaatctcttatcattaattgtatttttccagtcaatttttagagtaggtttcttctcccatcttgcttgaatttcaaaataattatctgtaccatctattaaataaagtgcttcagctgtattttgagttttatttatctcctcttctgcactccactgaatatctacttttattatctcatcaggcttaataatattaggaaaactatcatcccataagagcattttactagaatgaatttctttaagaattaatttgtagtcagaataattaataatttgtaattgtccaacctgcagcattataaacctcctttaatttttatttatgactatattttatatagaccttagatttttatgcttactataattatttatttgattctagagtatcttgtttctttaattttcttatcaaaacccgcacatttaaaaattccacctaccttttcataggcatattttaaccataaatagaaaaggtgctgcaaaactattagtaaaaatagttttgcccacctttttcatctcttatttttgattagaatccacatattcctttgcatttttaacatcaaatttacttggaacggatacctttgatactggtttttccttatggatatttgcccaagctgcagtatcatgctgttctattggaatttccataaaactatccttacgtctatcatccttattactcatattaactcctcccttcacaaatagtattttcaattttaagaattgtattaaacttttaatcataagttaatatagtttttgaaggatgatttatatttatactttaaacaatctcttttctgcttctcaaataaaaaataatatttctcccagcataagaaccaacctgttcaaacaagaaaccaaattgaattatattaagtagaaacttattacttggcgattgaaattcatatttgcttataactttcaaaattatgattacaaaaaaaattgctattgtaagaagacttccttttctaaataactgacctgttttatcatctcttcgaaaaatataagtttttcctcttagtataccaacacctactcctaaaataatcattaccgcaaaaaaagcacaataatttaaggctatactttttatttctatagcagatgatattgcaacatatgctaaaagtacaggagcaatccataactttttagggtttatctttctttccttaagctgattaaaagtgatccacaaaaaaatgattatcattacgattaatgactgcacctaaaccaccaacctctctattatctttgtaaacagattataccatgtatttcattttaagcatatcattactatataatctattatagtgaacttaacattatctcacccacaagcaccactatttacttgagaatttaaagctataatcttcgataaatttataaagtgcataatcaaaagataaggggtgaaatatcactatgcaaagaaaaagcctgaaatttgtatcaatgttcacaactgcagctctaacattttcatactgttcatttttaggtggaataaatgcactagcttataaaaatccagcctattttaacgacttaaaagtaggtttaactacaatggcaaaccaaacaatgagcctcaaattaaatggtgattatacgctaaacggtacactagttccatctcaaactatattaaatcttacagtatcaggcagcggtatttctttaaacggaactgtttatcagtccattatgatgacacctaccgctagtcctaatttaattacaatatccagtggaactcaagtatatagctatcctggaagctttacctttcaggttagtggtggcaaaattttgcctatagattcaacatctatggaatcctacttaaagggtgttgtaggctttgaaatgtcagattattttccaatggaagctttaaagtctcaagcagttgcttctagaacctatgctctaaacaatttaggtgccaaatcagctttaggctatgattttgacgacacaattagctatcaaacttataaaggttatgttccaagtgatactcatgttatgcaggccattgattctacaaaaggacaagttatcacttataatgatcaattaataaatgctgttttttcagcttctcatggtggatatactgaggatgttaagaatgtttgggggtttgctctaccttatttaatttccaaacctgacgtttataatggtcaaactgttgataacgcctcttggtctcaaggaaataaatccttctcgaatgctagcatagatactactttaaagagtaaaggctaccttttatcaacagacagttttgtaagcatagacttaaattccataactagatatccaagtggaagagtatctagtgtatctatcatttacaaagattcaacaggtactacaaaatctaaagctataacctctgacaaatgcagaacttttttaaatctacaaagttctatgtggtatttaagctatgatagcgttaatggaatctatacctttacagggaaaggttatggccatggacttggaatgagccaaataggagcctatcaaagagcaaatctagggcaaaactatacgggcattttgaacttttattacaataactctattgttgacaatgtaataaagtatgcgaaattgtcctcttatacaaatgattctactaataatcaaatatatttaggacaaactgttaactattcagcactaggtcaagacggctacggaaactatttatttaaatttggagttataaaaaacggagcagttttaagtgaaacagactacaactcaaataacactttttcatttactcctactagctccggggactatcaagtttatgtgaaaataaaagacaagtattcagacaagacttttgacgatactctttcatcttccttaaacgtacaggctataccagctgtaagcataggaagttttactgaagacaccacagattcaatagtttctcaaaaatcaataaacttcaatgcttctgccagcggaggtacagggcttggttatctatacaaatatgagatttctaaggatggagttgtagttcaaactacaaattacagcacaagtccaacattcacagtaaatcctaatatttctggagtttatacttctactttatatgtaaaggatacactttcaaatgcagcttatgattcaaagaaaagtttaaatttcaatatatacagtactccttctatatctgctttaaatttaagcaaaatagagcttctacagggtcaaagtacagattttgcgccttcaataacaggtggctctggcaattatttatacaaatatgagatttatcgtaatggaaacctaactgcaacacaggatttctcagcaagcagcaatttttcatattcaccaaacacctttggagactattcagttaaactgtatgttaaggatgcactttcaactagtgattacgatgctgtaacttcagcgaactttaaaacttacgctgcaccagccttaagcagttttcttttggattcgcctcaaatgatatctggatcttcagcaaactttagtgcccagatttcaggtggttccggcaatccttcatataaatttgcagtttataataatggctcgttggtcactgatactctttacagcttaaatagcgctttttcattctctccaagcactgctggtatttatcaagtttacgtctatggtaaggatagattagaaactgatgcttacagcgttatgggaagcacctccctaacagtttttaatcctgttaagatatcaaacgttactgctagtggctatatgtatgacggaaaaccaattacacttacttccaatactacagacggaagtacttctggttttaactacagatatgaagtatataagaatggtgcgcttgtttcctccagcgactatagcatttctccaaattatacttttactccaataacctatggcacatacactataaaggcctttgttaaggacaatttaagcattaataaccttgacgctgaaaaagacttttcaataaatgtgaataaagctcctttatcagcagctctacctttaaattatgggatgacaagtggtgacgtaactaatcttcaaaacgctttaatctatttaggctacagtatttcaagtgctacaggttattatggaactcaaactaaaagcgtagttagctcaatccaatctcaaaattctttacctgtaactggcaatgtagatactgctaccctctatgttataaacagcatgcttgccactaaggcgggagttaaacttttaaatttcagcactttaccattagtttatggaaccacaagcagtgatactgtaaaccttcaaaacactttaatttatttaggttacagtatttcaagtgctacaggttattatggaactcaaactaaaagcgtagttagctcaatccaatctcaaaattctttacctgtaaccggaaatgtagacgctgctactcttaaggttataaacaatatgcttataaataagccagaaactaaaaacttaatcttctaattagaatttcaaaatagtatataagttttatcattctgtgggaagccattttctggcttccctatttttaaactcatcaccataatcagtcgctcaaacatttattttccgttttgtttctacgttaattctctttcttttttaaaacattgactactttagtttcattatcataatgagctcctattaaagctcttaatgtataagttattgtaagtaaggtgtacactacacaaagaatagtttttttatcaattaaccctaatacagcagcaatagcaaaagcagctgccgcaatcaagttcaatttccatcttttcatcttcagcatagtttttccctccattatttatttttttttctttcactcattccatcaaaggaattaaaaaaaactgtatcttcaatatcaagtctattgtaatgcagcgggtgtggtgttgatttacttgctggataacctattggaagaagtgctactggaactagatattctggtatctcaaaagtttctttaataatatcttcattaaaatgccctacccaagtactaccaagtcctaaatcagcagcttcaagcatcatttgagttgtaacaatgctagcatcaacaacccccatatcttttttatcatggggtcttttccagctatttttacaatcataacataccaatagaactaatggtgcatcaaaatgatatggagtacaggctcttaactttgtcaaattttcttcattttcaataaccaatattctttggggctgataatttacagcagttggtgcaactctgccagcttctaaaatcaattttaacttttccttttctacttttttatcactaaaacttctaacagaatgtctttcttttgctagttgtaaaaaattcatattaatccccctactatacaatatataatatggattccaaagttaaacttgtttaatgctgcttatatatactgttcaaatatattctctatatactataacacacttacaaaaataaacaagtattcattatttttcaaaaccaaatttacattgtttactttaaatcagtataaatctacaaaagctttgccatgcaaaactcatccacatactcatcatctataaacattgaattttttttaattccctcaattgagaatccatttttttcataaagacgtttagcttcctcgttgtcacacacgactgttagctcaagcctttttatcttctgcctttctgcccacaaattcatttttctaaaaagcttacttccaataccttttccttgaaactcttttcttactccaaccacaacgtatgcacagtgtctcactcgtctagtaacgcctctttcagcagaaataaatccaatgattttcccatactcttcagctactaacagcaaatcgtttccttctactgcttcttcaattaagctttttataaaactcaagtttctaactctttctccaggctcatacatcatatactttgtttctttgtccaattcatattgcattttccaaaaagcatccgcatcaataggtcttatttctcttataatcataaatatcctcctagttgtaatgtccttaaatattattgcaattttgttttatattgaccaatataatgagataaccttgaatttagttctaataccctttcaccactatggtagcttattatttcgcttgctacttcaatttcaatgtaaattgcccatcctttactaattagaattaatctacttaatatttattataacacatcttacaaaatattacatgttataacataaatatttctatattaacattttatttaacgaacgttctcctctttaggcaaattattatatttgaagtttttaaattcataacaagctttcttataacaatagtatcattgattatatttaaaccataataatccttgtattcttaaatatgtaaacttactaagtttattttttttcctctattgacaatattctatgggttgtaggaagatattttacattatatattttcccttctataacctgccaaccataaagatagcagtgcttaaactccacccttttattactttttacacttattccatctacttcttctgtccttattgtcgtaatgcttctttgaacaaatattccttgaggtttactagttgtactctcccttttaacgttatcaaccttaatggtatcaaaaattattcttccaatgctgtactcgcttgcatctacttttatattatatattgtcataactgatgacatccctaacaatataccagcaaataaaaatatacctccaattattgatatagtttttgattcacgatttccatcattcctctttctaaatatctttctttctctgaaaaaatcacctaagagcaggaacccaatataaaacgtaataacatatatacataaaacaacattgtctttaaacaattcagctttaaaaggtacattaacaaaaagagcatatatacttacagaaatatgcatcacaactactattatgtttatcgggtttactattttcttaaccatttttcctccatctttttattccctttattctttttatatttctcgttttcaaaatcactttgattgtatggctagtatcctatgtgttgtaggaagatacttaaccttatacacatgcccttttaaaatttgtgacacatagaatgaacaattcttaaactctagtttcttattgcttttaatgcttgtcccatctatttcattaataattttggtagtagtcctattagtgccctttccactatgagcatttcctaatataacattgttcaccttaatactatcagaaattatattcccagaactatattcactcacatcagctcttatatcatatatattcataatagaagccataccaaacattaccccaacagttaaagaaaagattccaactatgaaattagtctttaccccatatttgctccttctcctgtttttaggtgtttttttcaactttaaagcttctactatggagtattttcccatataaaataaaactatatacataattagaacaaaactatatccaataaaatcttctttaaaaggtacattgcaataaaatgcatatatagtaacaaaaatgtatgctgtaattattattatagatattaagtttattattttcttaaacacttattttctccaattttacttattttttatgcacatatctaaatattcataaagcttttctcttcaaataatccaatactaaattatttcatagcctaaatatagggaaaccaagctaatatttttctcagtttccccatgactcaattattgtatattttccctttattcagctgatcttaaatgctctaatatatcactttaattacatcttcgcttgttatatagaaaatcatctcgataccactcaacaaatattttataagttttttctaaacgaaaacgccatgatatgataagaccttccattattaaaatttactgtacatatcttttaatgaatctcttatcatgatcatttgcatcttcttacagtacgctgccacactatttctaaattaaagtctatttttttattttatctatctttaactttctcatctttctatctatggtttatatatatttatctatctattgatttttcttctttactttatttaagtagtggcacagcgcctatttaaaaacactttcattataaagcatcattccatatttaatttgtctagcaaatctttatacttactaaagcatatttctcaagtgaaacaactcttttacaatataatgaatattttttatatatttttataatattataatatacataattataatattcatcaacacatcttaactgaaaaacctaccaaatatgagtattatacctcttaagctccacaatgcacttagaatatgcctaatattatatttttgtttaattttaaagtaaatataaactataaactattttttatacttactcataagacaaattacgctcgtttaattcccatatatcacttatacggtattaattgtcatatttctttatgataaaataatataataattaaaatcttaaaatagtgttttaaatttaaatgtgcattgcaaataacgctaactataagtacaatatatttatctaacagcttataatgaattaaatatatggaggaaaatataattatgattttgataggtggattcgtattatttatgatttttggtattattttaaggactggaaaggcaaattggctagtttctggatatagtatacttcctgaagacgaaaaagctaaattggatatcctaaagctttacaaacgtacgggaaatttattaatctttataggaattgcttttcttgctgattacctttgcagcaaatatatacactttccttatgaacatcttatacttgttgctgtaatattaatagctgtatttggaaatttgatttacataaataccggaaacagatttacaaaaaaatagcactatcgtttttaaataataagtaaattgtaaacttatgcatgcaccaatttagtacatgcataagttaattcccttttgtattatatttacttacttctttcgtatattatttattatattcattaagtattgatattgttaatatttttattattaatatactacctattagttgatacttagtttttattaaaaacatctttatagctcggattatcattcattttaactggtacaccacctgaataattaccaagcttttgtaaaattatttctccaagtcctgttgaattattatctaatgcccaaactgcaatagcaatagtatttttaccatttggatctaatacaccagagggcagtgaaaataaattctgaggtcccaaactatttatatattgaccaataagccatccatttacataaatataagcacgatagtttttagtattattatcctttatataaagtgcaaggggaacatcgctcattttggggaaattcaacttgaatgtagttctataccacgaaactcctggtgctactcctctttgctttccattgtctggtagtgttacttgtttccatggtttatcaggaaaattaggcagtgtccaaccattattttcaccatataatccacccgcattcattgcccctctaacaggatctatcaaagtctctccccccttatttccttgaatactccagaaaattgatgttgtatctccttgaagcgatgcctgcacaagtccacgtgggcttttatgtgtatccttgcatccaccatcttcatcatgtcccatgttctgtaccatcactgatatgacattgtcatcacttgtttttaaaacatttttaggaaatgtaaaattcttaattccgcttaatgaagcacctaagtaaaaaccatttatccacacagcatatgctccatttgttcctccttctccatctaaaataattcctgtttcttttccacttgccttaaagtgtcctctaaaccaaacaactccgtgatgaaaaccataatcatctgcatataatacagttggggttaaaggctttaccggattatttgtagttgttttatttgcacttatccaagatgaatcatcaaattctgactgtgcttcattagtttcatatgagtacttccaatttgtaataactggaattaatacttgttctggcgataacagagaaaaagtatatgataaataagaagtttgtaatgctttaactttttcaccattccacttgatttcattgacagacgttggagcaaatacctctatatctgatgccttatcagtatcaccttgtagttctaatttatttctatcacgtattgatgcagatcttaccaaataaggtcccctaactaaaatctctcctatagaagtatcttcacaccagaacgtttgagccgttatatccgttgtaaaaagcagcattaattctttgttgtcatcttttatcattacacgtgaaatacttccatcatgtttataatttaagcgtaggtctccacttacagaatcataccttgactttacatttccacataaaacagtcactttaggttgatttttataacgaagaactgtttcaccatccgattcttgtcctccgtaaaaaatagcagtgtctctatttccttgtgtaacataagtatataaattagaagttgaatacactaaatgctctgacccaagttgaaaattagcaactataaatttagattcttgtccatttatattgattgatgtaccaggttcttgtggaagtatataaatgccatctgcgctctgaattttcaaagtcgtattatcattactaattgaggaaccattactatgacgcagtatataaaactgagtttttgtatccgaattttcaattgcattagctaataaattaggattacttggagcttctatggttgttaatggatctgtctttgtaagaggggtaagcgttctgtacatagttgcaagtagcttttcttcattatactttgatccaagctgacggctctcacttattgccgctgtataatcataggaagagtacacacctggaaaaggcaaatacccccaatttgttccaccataagtcatgtaaatactcatcatagttgctccttcagatacaacatggttgtataaaacgttttcataattagcattataatttttagaaagtatagcgtaactctttcctccccaaggatcaaaccacccacctcctagttccgctaaaaacactggactatttggtgcaaatttacgcggatctccgtaatatgatggaattgccgctagtccagggtaactgtcatatgcatacatatctggtgcaccagttccactagaccatcttccttttggcccacttttgtcattatgaaaagttggtacattaattccatccttacgtgctttgtctctaatgttctgcatatacaaggcatctccacctgtatactcattttccacttggtacaaaattacgcttcctccatttgtaatttgatgcttttcaataattggatcaatagcactcagccattgttcataggcagcagtataatcttgtgaagcagtacgcgctcttccctgctgtgttgttaaccaacctggatatcctcctccgtcagtttctgcattaatatatggacctggtcttgcaactacatataacccaatcttttgtgccatagtaaggagtttatcaacatcgcgaattccagaaaaatcgtatttcccttgtttaggagaatgaaaaccccagttaaagtaaatggtaacagcattaaaaccagctgctttcattttttctaaaacatccatccagccagattgacttggtaaacgccaataatcaaactcaccagaataaagaaaaattctttttccatcaatcatcaacgaatagtgatcatacgaaacattatgaattccttttaatccttgagatgatggcaaagtaaatgaatcattattgttgcgtgatattttcttctgtatagtatcagcatatatttttgaagggaacgttaccgctgatatataaataccaacgccgagtaaacacataagtacttttttaaaattattattcattactatcctcactgacaattatatacataaatattataacatatccatataaaactttttataaataacgaaacatatttaacaaaaatttatattgcttttcaaagtaaataatgtatataataaagaaactagtggaaatgaaagggtgaaatgcctaacatggaaaagtataatttaattaatgaaattaacagcatcatgcctaattatgatgtaaaaaataaagatatttcccttgatgtatatgtaagtccaaaacaagaggtgtgcattataggacgattagatagtaactatatatgttggtgttctattacaaatcttcaaaaaaaggaaactacaatagaaattttaaattgcctactgaaatatgataaaaaattcatttcaaacgaaagtgtgctaggaaatctctataaagaagttatgtcatggcataaattatctattaaaagagtagaacataaagacggcccccgctattactcaccagtaaataattgcttttgtggcggagaagaatataataatggagaatttttatttaatgaaattagtactttctatagccttgaattatctaaatgcaactatcgtttgattgacaattcttatacaaaaatacttaacgaatataaaaacattttaactaaagatacagattcttattattattggaaaatgaagcctttaatatcaatacttcaaagtgaaagctatataaaattgtgcagagatgaaaaaatacgaaatttgtatttagcttgtgttcaggaatgttctaatttatataaccgatatatgacagcagtacgttaaaattttcttattttaacctctatgcttatattaatatgatttctaacaatgaagatattggctttatcttcattgtctaacaaactattaccttcatagacctcccttctcctaattatattcttccaaatacaccactctatttttcaaataaattcatcttacaattttatacataccatcaaacttccataaatatttgtatttaaattcttaaccaattaactattctttacttttttatatttatatttagaaattaaatgtaaatattttttttacaaaacttttcttctccctacaacttttccttatttacatattggtttactttgttttattgcgttaatgtctttattcctgtaaaaatatgttcttagtatattacctgtataacgattttctaagatttattttacgctccatattaacaaaaaatggattatacaactctaaattttatcataataatacattatttccaattgcaaacataatagttattcacaagaaaaacccctctttctgtaagatgtaaacggttatttttacattaatgcttttaacaagcttttttgcttatttaacaacagttgacactttttatttacaaatattataattattatatactaaattacaaatttaataaaataatgcacttagggggaatattttatgaaaaagaaactattatctttagtcttaaccactgctgttgtatccagcataagtggtttcagctcagtttcagctcaaactttagctactaaaaaaccatcagttaaacaaaattactcagtaaaaaggtcaaattctaaggttatcgcaaatgactttgaggatcaaaagaaaaatgtatttttgcatggaaatctttctggtaaattacaaattaatgaacaatctattttagcctatcttgaacaaaataagtctcaattcttgaatgtaagtggagcaaataattttaagatactatctatagacacagatgaattaggacttacaaaagttaaagtagctcaaacagtagatggaacaccaatacgtggaagtcaaattatactgcacttggacaaggatggtgtagttaaaaatattataggagctgttaataaagattataaaagacctctatttgcagctaggtcccaaggggttacagccactcaagcaatttctatagcaaaaaaacaattttcatttaaatctttggtagaagcacctagagcacaaaagcaagttatagttaaaaatggagtggctactacagtttacagtgtaaacattcattataacgaccctgatatagcaaattgggaagttctaattgatgccaactctggaaaaatagttagaactttagataaaatagaatatgacggacctgcaactggtaaaggaacagcagttgacggaacatcaaaacctcttaacctataccttactggaagcacatatcagcttatagatacaaccaaagcaatgacaggaaaaataaaaacttataccgctaataatagagaagttgaacctggaaccttagttactagtaaatcaaatatttttactaatgaagctgctaaggcagaggttagtgctcattattatgctggtgtagtttatgacttttacaagaatgtgcttgggagaaatagtatagatggaaatggtatgaacataatttctacagctcactatggacaatcttatgacaacgcttattgggatggaagtcaaatggtttatggtgatggtgacggaagtgaattcacttatttctcaggagatcttgatgttgttggacatgaacttactcatggtgtaactcaatatactgcaaacttaaattatgaagatcaatctggtgctttaaatgaatctatgtctgatgtatttggagttttaatacaaacatatgataagtacaatgttaaaaatggcggtaattgggcatttagcgcatccgattgggttgtaggagacggtttatttctaaataatacaactcacagagcattaagaagtcttgccaatccaactctttatgatcaaccagataacatgaataattatgttaatacaagtgatgataacggtggtgttcacacaaacagtggtatacctaacaaggcagcttacttagttgcaaaatcacttggaactaacaaaacagcacatatttactatagggcccttactaattacttaacttcagatgcagatttttcttctgcaagaaatgctttagaatcagctgcttctgacttatacggctcttctggttcaaatgctgtagactctgcttttgataatgttggtgtttcttcaaatagcgataactattaattctaggtataactaaaacactcttaccctattacaattatgtaatagggtatatctttctgaaatataatgctaattttgatattttcatttccacaatattttataactttatccatctagtatatacaaaattatcattacttttccaaatttttatttcatattacatcttatctacgaattacaatgcattatttaattttcatcatttgagacaattcttatatagtcatgctatataggtatataatggcaaactctgtactttaaagccgtgtaaacgtttcttttcacttgaatatcactatagtaacttttttactatttatcaattagttgacatgtaactttttaaataatataattatcacataattatgttatagatttaacaaaataacatacgaaaggaggaggcttttatgaaatgcaaattactttctactatacttaccacaatcattttatccactttaggaagctttaacaatgtgcttgcatcacaaatgtcaaccacagataagaatttttcttttagaaaaaagacaaaagttccttaccaagatgaaaaaagcaagatttttttcaagggaagcttatcaggaaagttgcaaattaacgataagtcaattttagattatttagaaaaaaataaatctatgttccttaatgtgaattataaaagtaattttaaaatactttcgattaataaagatgagcttggtcttacaagagtcaaagcaatacaaactttaaataatattcctatacgtggaagtgagattatacttcacctagacaaaaatggtgttgtaaaaaatataataggatcagttaataaatattacaaaaagcctctatctttagaaaacactcatgacatttcacctaattacgcaatatcaatagctgaaaaacaatttaattataaaaccttattagaaaagccaaaagctgaaaagcaagttataattaaaaatgctacagctattttagtttacagcgtaaacatacattatacagaccctcatatagcaaattgggaggttctagttgatgctaaaaacggcagtgttatcaaaatactagacaaaataagatacaatgatgatataatctccaaaggcactgcttttaattgaacaaaacgctgttcacaaaatagaggcataggacttatatggaaatagaaaaaataaatttggtatgtaatgcctttaagtctgttggaattttaaattagcgaaccccttttattaaatatatataatagagaagcctgacccttacccgaattaggcttctctattctcatttacaccagggtatggcttaaggttatcactaacttttctttctataaaaccttctgcaaactccatcatattattaaagaatacagtaatctttttcaaattttttcttttgtttttcaccgtaaataattttatcctcctgttttcataacctattaagtaagagtataaatcactcccttgttacttaacaaagcttgcacccatttcatatgctcttttacaatcttctggaaaaacttcttctcttcttttcttttttgcctcaacatcaaacatagaagcttcatactttgagtaatcatcaaactgataggtatccgtgcttaaaatatactctgaagctccaaaaatcctcttaagagtagcttcattactctcaaatagcttattgtaccctacactatccaaataagtctctggaacattcatagtatatataaagcctgtctttatttttctattaaaaagagaagaatgatctttatcatatactaagtactgaaataataaacgttccataaaggacctcatttccccagttaccatcccaaagtatattggtgatgctaaaataaacgcatctgccttttctattttttcaagtataggttttaaatcatcctttaatgcacattttccgtagcttctacctccctttaatttacaggaaaagcaactaacacagcctttgtagttatagtcataaagatttataagttcagtctcagccccctgtgctttagcaccatcaagtgcacttttaagcatttctattgtatttccattctttcttgggcttccattaattccaattatcatcatgttaaaacctcctatatataaatattatcataattatactactttatctttttagcttctattacaagtcccaaatttttatggtgttttcattggctatcttctcctaattgttactattataatataaatataataaaaaccttttaatatcttaaacaaaaaggtgtccttaacttctctcgctaaagccacctcatattttaaattatttcttttatttttcttttatgctttttataaactagaaatgaaactcctaaaaaagctataattgaacttagctgccaaagtgttggacctgtagtcactgttatttgaggactataatttagatagcctccataaacgtatgggttaggatcggcttttattaaaaattgcacctgtttactaacaccattaagtccaacttgagctaatggaattctaaattcaaccgcatatctattatcagatgcagaatacgtactttctatacttgtcccattaaaactgacatttacaacgggactataataccagctatagtttgtagtaacatcaaattgaggatattgatgatttgtaaaaccttttgtggcatttaacataattactgagaagtgccaataggatgaacttgatgcatatgttctatcaacaaataaataaagataatcctttgatgaaacatatttaacctctatatagtttacccaataagtggatgagtcatactctgcataaaacacaccaggcatatttcgccaatcgtagaagctgccatctaaagttattcctgtagattgattactagcagcagcatacgcagtagaacaggatgaacatattataataactgaaaagaatattataagcagccttttcttcaaaattcacaccaccaaataaaaaattattacattatttatatactctaagtaaaagtaaacttctttttatggtttttccaaccttcattttgctttctccaccctttaattgatattttaaaacaaaaggtacctctcctattttaaaattttccttgcttaccttaactataagctccatcatgcaagcaaaacctgtttcctttacaattctctttccataaactttatgaagcttctcaagtacagaagttttataaagtctgtaaccacaagtataatctctcacattaggtataccaagtcttatggtataaagtactctagcaccaaaagataggaactttctaaatagtgataatccttctaccttagccccccttctatatctagatgcaattacacaatctaatttttcctcttgaagtttatctaacatggaaaaaatatatttaggctcatgggtcatatcaccatccattaaacacatataccctttttgcttttggcttaaaacataatttataccagtatttaaaccttctccaagtcctttattaacaccatgatctatcaccacaacattgtcattgtgcttactaaaggcctcggcaacagctaaagtattgtcagtacttccatcattaacaatgataatttcgagcttaattcctctagcttctaaatccttaaactgaacattccactcattaattagttttcctatgttagcttcttcattataactaggaagaactacatataaattctctttacccattatttatccaccccttaattctgtaatataaacttaaatttttcttaagtcttacatccacaatttccctttcctgtgaaaaggtttttgtattccaggaggcatttttttcaacagcatttattatccctgctactctgatgaaaaaaaccacaaacctatatataggtagaagtaatataatgtaccagtgtttattgacataatccttaatttgcttcttttccttcaaaaacaactttgcaataaaaaaataaattgtagatgttatgacataaactatatataaaataagatttgcaccaaccaccaatgtcaaaggatagtccaagaaaactaaatacatcattgcaaatatccatatgaatctaggaaaaactaaagaatgatctttaataattgtaactttcaaaacatttataaatctctttgtattcttgtttgcaatttcattaaaaagggctgaaacctccatttgacctctttgccatctttgtctttgtatatagagcttgtctaagtcatctattggatcaacatagaaaaacgcttcttcacaaagtgctatttttccatctagaagctctcttatttgagatgtcatatgagtatcttctccgagagtttcattattataaagctgtgttttcattataatctctcttctatagcaggaaaaagctcccgctaaagtaaacatcatatttacttgtgattgaaagcctcttccaattaaaaatgcttctatatactcaaaaagttcacagcgttggattaatcttaaatttttcaattttgtttcttcaataagctccggatcagttagaaccacaccagtcattgcgcaaatatcaggattagtttcaaacttctcaacaacctttaaaatagcctctttatcaagaacaccatcagaatctatatttataatgtactttccatttgccatataaatccccttatttaaagcctttgctttcccacttgaagaatcaagccaccacaccttgagtcttggatttctctcttgaaaggaacaaaaaacattgtacgctttatctcttttgccattattaatgagcatcactgatattttttcaattggataggtttgatttattacagaattaagacaattttccaaagtgttttctgaattatatataggaataagtattgtaatatcaggcaaatatcctatatcaagttttttctttctaaaatagcttacggttatgaatattgcaccgattactccaccgattatatctacaataagaggaatcaccagccaaattccccagaaaagcaattgtataataagctgctgtttcatctaatttcccccacattctgatatttaagttgagtagatgtaaaaacataaaagtagagtataatcataaacgcaaagaataaaattttagataaaagcgtatgtgctatataataagagctaactccaaaagttttagttattactataatgaacaaaaccctaattatatttgataaaaaaatgtatatatcgccgaaaattatataaaatactctacgaaaccttgttccaaatggaaaaaataatataagtgatgtaaatacaagcatttctattacgcctgaacattcgtaatcaataaatattgatatagcaccgcctttagtttctaatgaaataattgaattttctataaatacttgaaaatacccagttaaatgtcctatagtatataaaaccgttgaaacacatctgttaagagatacctctaaaggattcataaaaaacaccatacttatagtgaatataccaagactccctgttataaactcaaaaaaatccatttttaaatttttgaacagcactaaaattgaaatccatattattgttactattattaaggaatctaagttgcccatttactcatctccctcttctaacatatccttgttttttaactttatatatattgataacgctgttgttaatgctatgataataatagaaatcactattcctactcccatatgaggataaattattttcacctcaactgatgatgattttaaatgaattaaattgttctcagaattgtaatttcctttaagcttcacaaaagaatccaatgctgctattggaacaatttccttactactgccctttacctttatgttattatctttaatttgaatttttacatcctttactactctttttggcaattcataactcttcatatcaagagcttgctctaaaactttcatcaacccttcatcctttgtcaaaaacacgaaataaggaatatttagtccaataaaggttagattcttattatccttgtttcctacatatttgattaatctatgatcaaccacaacataatcttttctgttattgaccccatttaaaaagtttgcattccagcttggataatcacttggaaacttggctgtattaagcttatttccattaaaataaagctcatcaaatttgtttttgattacaataggctgccccgtcacgtttagaaaacccgagtcttccatacctgttatatcaatcaatacctttactccacttcttgaaagctttaaaaacaattcttcagccttatctctatctctgtacttaaatcctgctaaatataccgctttcttattttttaattcaccataggtataatcatcaaaataaggttttgttccaacctcaaattcaggaaataagtaagttatatttgaggcataacttccaattgctataccctcataatttacctcagttccaaatgtgcctttaactggatacatatatatcatggcatcatcattctcagtatatttaacatatccaactttagctgcatacttatctaattccttatactgacttttcttagtaataagtcttttccttatcaccaaagtatctgcccctacctctaaagctctgtcgaacataagcccaaaatagtgattttcaagagccgtatttaacgtaacaatattatttgctgtagtagctccctgccatgcccatccataaacctgctgcttaactccattaaccgaattataggagatgtagtaggttggaaaagagccatacgttgaattatctaaaactccaactctttgctttgcaatagaacacgctatatctattgtttttgcaatatccccagggtacggtctgttgtagcccaaaatataaaaagaagcactagaatccacaacaaggcttataagtataataataaggatactttttctaagttttatccatgtaataagacctataaatatcatcgctatggcaaaagcagtaaatcttctcatccaaaaaagctgattcattggcagtttcactaaaagaggcaatgcacttttagtagtaccaacaagtataattaaagctgcaacaaatggcgctatctcatttctagttgcaaatagtattccaaacaatattacaattccaaaggataaaccaaagtaatacatctcaatatccttaaacctcaataatggatctaaggaaaccgtcaaaggatacgttaaactttgcattacgtccgaaacagctcccttatctatggacattattcctccctttaaagcaggataaagccaaaaacttgaacagagcattcccaaaagagcataaactaaagaaataatgttttcataatatcttttttttgatattgcataggctagtcctactataaaaagtgccataccaacaatcgcagaaatcatagcatgtgttaaagtcaaaatgctcatgagcatagctaatcttaaatagtcccttattttctttcccatcatggacttataataatagaagaaaaccattggtgatattgatataaccgttacaaatggtatatttccctctgaaaataacactcttagattatccggtataaaaaaccataagatagccagtacaatagctatattctgtcttctagtgtaatacccccaaaataaccatcccatgcctccaaccataaatacaagttcaacaaaaacatcaaaagtagttatcatattattagtgaacatattaattactgctaaaatataatatggaaatggagcccaatacctatatggctgcacaccgttataccaatttctatcgtagtttaaaaaaagcgtgcccttttttatactgtcaaacaaaatattggctttataaaggtgcccatacgtatcagaaccccatggatactgtccgtttctatttatagctactaatgtaattaaggaaaaaataaatagaataataagatttctaacaaaaatcaacttatccttttttaaattcctatgaggtatcttatctggatttgtaatcttttcatttactttatccatgtatttcacctctattattcttcgattacatatgttcttgtaggattctcactaatctccatagaaataaatttcatttcctttttactaataatatctttgatatatggtataagtacttttcctatactttccatagtgggatttatgtctttaaactcctctttttcatttaaaaaactcccctcataattagccaaatatgcttgaacttctttttcaacctctccaaaacttatggtataatcctcttttgctccaacatttattaacaattcccaagtatgcggatgtatattagaagctcttccatcaataattgctacatgccttgcattaagataaaacttaaacttataacctgttctcatttttttccccctaacctcttctaccaaaaaccccttgtctaataaaataagtaataaaaaaaggtgttgccatagataagcattttgaaattgtaaaatatataccgagccggtcatatgaaatccaaagcgttaaatctgataaaaatattccgctaataaaagtcataacgtaaacaaaaaatgaacccagatttctgtcatttttaaatatatatttagagcacagaaagtattgcactaagaatccaatgattatgcctgtattggaagctaccatatatgtcattccagataatctataaagtaaatacgatattataaaatctataatgcttacaaaacacgatacgaaaaaatacttatagatgtttaaattgaaaatttttgataccagtgtaacacctcctacactaaaggaatatgtttcatataattgtatataaactcaatgttgtattattcatgtcaaaaaaagaatatttttgtcaaagtagttatcgcctcatattccattttctttatatttattttcaataaaaggtggtaatttgtataaacataacttattttggtattatatgtagacagcgtaaatatcaatttaataaatttataattatatttactttttactcatcatattatttcaactatcttaaagagctacatttaattatttaaattctacaagctattaagttttctaaaaaacaaaactgataatatagaaaatattctaaaggtatccttaaaataatcttttcacaaatacattttagataaaataaaaggtactgcaaactaattttattaatctacagcacctttataaataatatacctgtatagaattttagaaatatttacttttctattttaatcgacggaaattccaaatccttatacttggcaaatttctccttgacaattgataaattctcctcagtatagaaccctccttgcgtatgtgcaatctcttttccatggcaagctctcccattaatatctgttctatcacgacacaaaccgttctcagcaataacaaacttccactttccatcctctgttttttgcaaatctccacctgctccacacacttgacactctataggaaaataaagtccgtcccattgaggctctcccaaaataagtgcattggaatgacaattaggacaccatcccattttctcatcacctaaccattttctgtcttcaacctttgtatttaaggatttcattatattttctccgacttggtgagcacgtttaattaaattattattaagtaaacattgttttggcgcaggcacacgggttgccaagagcatatctacaattttaaaatcatttgtaaagcaagttgcctgcatagcctcaagcgccatcgactgccaggaacgtgttgaacctccaactgcaattaatgctccaattctatctctatgctctacttcacctatttcctctagaaatgaagattcataacttaaatttctatgcatgaactttaaaaatgtagctgttggcattaaatcatatgtaggtgctgaaaatataactgcatcttgatttaacataatatccattatagtcttcttatcgtctcttccatccaagctgcatcctacatattttcctttagtcatagcgtgtgtacaggctgtacaccctgtacactctaatatattgtaatctctcaagttgatcatcattgcttctgcaccttgatttttacatgctaaaagagcttctttcaataaaatttcggaatttgaatcctttcttccagctgtaacacccattactttaaaactcatagttaaaactccctctttaaataattcgctcataatttaccataaaaaacataatatttattaaaaataactcaatatttttccaagctcttcttgtttaaaatttcctcactaaaacactactttaaaatcttttcaaactcaatttcatgttttataggtatatcaaagttgccttttattggaatcgaaggctttaattttcttgcactatcaacggaattcaagtaaagttttgccatatcaaagcctcttttttggtaaaatctaagtgcatttatattgtcatttgttgtaattaactttattttatttaattccaaacatgaggctattttcaccgctctattcacaagtgcagttccaataccctccttttctcttaaactatctaaggacactatctccatttcatttttacaaagcttataagtaagcaatcccaatatatttttaccttcatacatcactagtcctgataattcagacatattcaccatttttcctctaacaaccatgtttaaagaaaaccaatgacacattataaacttatttatactttctctattttcatatgatatctctcttatttccatgtactattctcctataaaataaattcattcgtattccattatacaaataaatatttatccacttttacctttaatgataaaattctcataacaaactctttttcataatcaccgcaggtaaaatcttttttccccattttaacttagcatttttaaattccataaatccgtttcttctccaaaatgaatacaccttatcgttatatcctgcaaccacatctattcttatacacaaacttcctctttctttagcgtatttttcaaaagccttgtatacctctataccgcagcccttacttttatactcactattaagcattaaaagcgatagatatgtttctttttctattttaaattcaattattccagctagttttccagtagagctctctactattttacaataagaaaaatgtagttttctcatacagtccacttcactctttacccaatcttctgtaactatgcactttcctatatgtcttgcaagaaagcccttattagaattataaactgaagttatctcaccaaaatcatcatctcctattaaatctacataaaaaccgtcgccttcaaaaatcatgttactccccctcacttgtataattaatgaaacaactactataatcataatatgcttttactgaatttctctgctatataatctacatatccttgttttatttttaatccatcatttattctttcaactactctatcctctttaaacagtaccttcatgtctttaaaatacttatcagcctcctctaagctaacataactgtgaataactttctctcctctctccagctgtaaaaactctccctctcctatcttttctcccttattgtacctctcatcttttgttgtaagaaagtttatacatgcaagaccaccaggctttaaaaccctctttatctcatctatagcttctttaacgtcattctttctcatatgaaaaatagtaccataagaataaacaaagctcatggattcatctttaaaaggaagtttccttatgtctcctttagaaatattaagcttaaaattattctctcttgagaagttctcagctttcttaagctgtagatcgcttatttctatgccgtaagttttatagccatcctctacaaaaatggaaagtggtggcaaatctcctccagccccacaatcaagtactgttttatctaaattgctttcattacaatattttagaaatctgtacaactgtggctgtctaattatagttttcatagtaacctccaaatatttttagaatccttttaagtaaaattataccacttaacctaaaaccaatgtaataaaaaccataatttataaaacgtttgacataaaaaattcacacctcaaataagatgtgaatttggtattttaatatttactaagttccggtatatattgtttaagttcattattgcttactccagctcgatctgccccagtaagacttcttacagtttgccaaatatccgtatcatcattatctgctgaaataaatacactaatgaacgaaccatattgagtggcaaatactcttctttcacctataaatgttactttaggtaaatatatagtagaaccatttttagttagtggtcttacaggcacgtcatttattatgtttgcaatttcagtcccttgacctccgaaaattgcttttgaaagaactgaatatgcatggtttattccatttatgacattagaatctgtactgtcacttccgatcgttgtcaattcaatatccatgctcggataatcggaatgacttacatcacttatataaaatacatcattatctgtccctacaccattgttactgttataagttattccaatatcaggtgttccattaggactaaatgtctctgttaacaagctacttttaaaatcagcattaagcacagcatctcgcactttagcccaagtaaacttaagtgatgttactggtgaaaattcctctgaaataggtgtactcccatctgccgttttaactattctcacctctaaggcctcaattttcaaaccttttccatctgttcctgcctctaatccatcatgtacccagtcctgccaacctatgctctgtacatgtactctatactgaacactatagccaggcatgttttccaacctaatgttaagagcttcaactcttaagcctcttccatctgttcccgcctctaatccattacttgttggtgtctgccaacctatattctgtacatgtgtttgataatcaatttttgcaccagctggagcatttacaagatttaattttatagcttccactctaagagatttaccttctgttcctgatatctgtccattttcaactgtatcctgccatcctacattttgtacatgtccagaatagcttatacctatagtcgaattgttcgatatcttagaaattttcacttccaaagcctcaattcttagtcctttaccatctgttcctatttcctgtccgtcagctacccactcttgccaacctatattttgaacatgtgctctatactgcacactataaccaggcatatttttaagttttattttaagcgcttcaacccttaatcccttaccatctgtccctgcttcttgtccatcagccacccatgcttgccatcctatgttttgaacatgcgtttcatactgaatgcttgctcccaccggtacattggttaaacttaattttaaagcctcaactcttaagcctttcccatctgttcctatctcttctccatcacctacaggattttgccaacctatattttccacatgtcctgtgtaagaaacccctacatctgccacagctcctgcatatgcaactgatggtttaaaacaaagcatactaataccaataatcacagctataaatgttatagtgactatattgttacttctcacttaacttcctcctcttataattaaattaaaacttattcatatattaaatccaatggccgctttacttgtagctccctatactcaaaatatttaaattataaaaaacaaagaggcttcaactgctaaagacatttatagctctagtttgttgaatcctcctttttgtgtttatactaaatacaagttaactatgtagcaaagcaaacccgttttacgatactgaattcattaatcatctacatatattgctcctatatctgttggtgttgttcctgttgttgttgttcctgatggtgttattactgttgttgttcctgttggtgttattactgtcgttgttgttcctgctgtcgttgttcctgctggttctgtttccgttgttggcgctgttggtattgttggttctgtttccgttgttggtgctgttggcgctggtgctggagtaacacctcctgcagcattaactattcttatttctacagcttctacttgtagccctttaccatctgttcctgcttcttgtccatcagctacccaatcctgccaacctatattttgcacgtatgccctatattgaacacttaatccaggtaagttttcaagttttactttaaatgcctcaactctaagtccttttccgtctgttcctgcttcagctccatcactaacaggtgcctgccaacctatattttgtacgtgtgcctgataatctatctttgctcctacaggtgcatttacaagattcatctttaagccttcaagtctaagtgctcttgactctgttcctgatatttgaccattttgaacttcattttgccaccctacattttgtacatgcccagcatacgttacacctacagttgagttgtctgaaatcttaacaatttttatttctaaagcttcaactctcaatccttttccaactgttcctgcttcctctccatcggatacccagttctgccagcctacattttgtacatgtgttctatactgaatactgtatccaggcatattgtttagttttatttttaatccctcaactcttaagccttttccaactgttcctgcttcctgtccatcggaaaaccaaggctgccagcctacattttgtacatgtgtttgatagagaatactagctcccacaggtgcatttgtcaaacttaattttaatccctcgactcttaaaccttttccatctgttcctgcttcagctccatctgtaactgcagtttgccaacctacattttgtacatgtgcttggtaagaaactcccacattattaattatttgtaaagattccgcctttacacctcttgaacaaatattaattacactagctccagtaagagctgccgccatagctaaagccatgattttcttctttttcattgtagttccccctaattttcaaatattaatcttatgtattacaacaccttagtaattgtagaataacctaatttaatttctagtacatgcattagtttgataaatatgcattatcattaaattagttcacatatttacatgtatcgtcaaaatatctaaaatactttatatgtttttattttttatatggttattgcagtttttttcaacgaaatatttagcgtaatttaattttttattcatttaaggtaaaaaagttctgcacaccaactgtatgcagaactttttgttttaaagtttatctaatttccgttatcgttatcgaatataaaatatattttcctacgctaatctactaaaaacataatttatatcattagttatcctagcatcaataaagcctttatccttcatattgtttaaaatattcatggcaaccacatgactaagtgcctttctgtacggtctgttttccgtaagtgcctcatatatatccaaacaagctataagcctagcattgaaatctaaatctttagcaaccttaccaaaaggatacccttttccgttcaacctttcatgatgatttgaggcccattttgttatttcctcaaaacctgttatatcatgcagtgccaacttggtaaaataaggatgcttttttatttctttaaactcctctttggttaacttcttaggactgtctaaaatactattgggaacggccaattttcctatatcatgcaaatctgcagcaattataagcttcagcttctcctcatgactcattttatagtaatcagccataatttctactttttccgacaaatcactggaatgtctttgagtatattctgatttacaatctattatcttagataaaacaccagttatttttcttatctcatctactggaagctccattctatactgaggaggctcatgccttaaagcttcctctaaccgatcgttttttaagtttctccataaactttgatcttgagcagcttctataaatgcatctaccattcttgaggaaaaaagcttatcacgactttcctctgtaaatttaactatccttttttgcatttcctcatcatttttatccaaacgaaatcttctatctataatatccgatatggcaattatttgcgataaaagaggtatatgttctccctttagatgaaagaaaccggtgccattataattttcgtggtgatatttaagaacattctttacatctgttaaaaatggatactcacttatattattctcccctataatacagtgttcttttatcctttcaaagctcttaaagtttatcgacttgtttttgcttgacaatattctatcctgtaagcctttctcgcttgctccattatcatgtaaaattccaagtgcaactatatcgtgtaattgttctattcctaaaccaagttcttttgcaattcttaatgaaatatatgctgttctcttgctgtgattagatgtaacacctattatatctatctcaacaaaatctaatgcacgcgaaacagccattagaaactcgtttaaattaaataacattcaaccacccttacgtctgtataataattatgtcttttttaaaaagttaatacgaatttgaattaaattaaatttttttcaatattaataaccattatcattttaaattaaattccatcagctgtcaattttttattatgaattatcgttattataaaaaacaatttagtatctaagacaacgttttcttgttgataatctcgcattttttatgtcatataatgctctattctatacgataatcataaacaatagttataatttacaaaatcatagttattatgtaggttttcctttatactattgtaaaggctactaaaaaatagtactatacctattgtcctgcaaaataaaagggaatgcgtatactattttacacattcccttttacctattttttaaacgtaataccatttggtactcctccaacagttatggtgcttacaatcttatcattagcattgttaataacgctaactgtgttatcatacatatttgtaacataagtaaacttattgtcatcacttaccacaactccatgggcaccttttccaactgtaattgtagccgctactgtcttattttgtatatctattttagtaaccgtatttgaaggtttagtttcagtcccttgatttgccacaaaagcatacttatcatctggagataaataaacctgagctggtcctgcaccaacgaacactttcactacactatcagttgaaagattaactatggctaaggcattttctgagttcactgtcgccaaaagagtatttccatcgcttgtaacagctgttgtaatcggagtgtttcctacctttactttccttaattcctttccagctgcaatatctacaacacttaccgtatcttcacccatattagcaacataggcaaatttattatcctttgaaatacgaaatccgtggggaccgtttccaactcctatagtttttttaactttataatctgatgtgcttattacagaaatattattactcatattatttgtaactaagacattctttccatcaccagtaaaatctatatgtgcaggatgtgctccaacttgaaccttttttacaagagcatccgtatccgcattgtaaaatacagcatatccgttactaaccatattcttcatagttttatcattagaatttgattctggtaatatattcgtaacacctaatatttttttgtcaggtgatatttgaacattatgagcctttcctcttattcttattgtatcaactactttatttgttaaagtacttactttagatatacttcctttttcattagccgtaaatacgcacggaattatcttatttgcacttcttgaactctttggcgtagtctgtggtgcctgattttgactgcatccaactgtaactaaagctattaccaaagataaacttataaatttaagatatttcttaagcattaatatcatcctttcttaagtattatcctaaattattttatccagcctagtttaaaaaatactgtgaaataactctctaaataggttaatattctataataattttttaattatcaagcttgctttgatactaaataacagtcatcactttccataagcgcctcattatatgttaaaagaactctacttgcaaaacgctcagttgaatactccttaatcttttcttgaagcatttccatcatatgaattttgaattttttattgtaaatcacataattaagcgccctcaaaaattcttcatccttcctataagcaaaaccattttgtccatttacaattaatccttttacacacatatcccatttacatatgataggcaaaccactagaaagtgcttctacatacgttattccctgagtttcgctagttgacgctgtcacaaaaacatccccaagcttatagtacttacaaattttatctggagaaatcatgcctgtaaattttacatattctgaaagtctattttttataattatgccttttagcttagacaaatacggcccccctccaactataagaagttttatatttttaaaaagcttcaaagccattctataaagtcttataacctcttcaatatttttttcttcggcgattctaccaacataaacgagaacagtatcttcctctgtcaattcatactttgataaaagctcgagtttttcctctttgttcagttctttttgaaatttttttatgtcaattcctgtaggaactacatctatattagtcgaaacatcataactttgtaatttcaaccttaccttttctgttggcgctataactgcttcacagctgtttaatagcttctgtgttacttttgaaatcccagccttacctagtattcttccacacaaaagataatgaagataatcttcatacatagtgtggtaggtgtgcacctccggtatatttagctttctttttatatacttagctaccaacattgtagaaaattcagtttgtgagtgtataatgtccggcctccattttattatttcacccactattttatttttaataggtttcattattctagcatcagggtaaatacctatggcaaaagagctgagataaaagacatctcccactaccttctctcctccatccggagacaaagctagtattctaacatcatgccctaaggttttaagctgtctatataagttattaatagaaaccactactccattggtcataggatagtaggtatctgttgttataagtatcttcatcttcccctcccaattacactttaaaataacatgagcctatgcccacgttattttagcgaattttaaatcttattgtataagaaatttaatacctaatactctaaaaatcttcttttcaactgcttcgtatagattttcaaccttatttcttaattttaagttataaatatagtttgttacaaaaaccattatatatgcacctaaaacatccataggatagtgatttcccacataaactcttgaaaaacctacaatcagtgatattaatattaaaattctacttattaatttattataatttctaagtcccaaggctatactcattgtccctgtagcatgatcacttggaaaagaagcatccttagaatgctgtactaataagttcaccttattatggacaaaaggtctatcctcataatataattttccaattgcaaaactaaaaatcaaattaattacagttataacaaagctgctgaaaacagactttctgtaatttcctttgttttttacaattcctaaaacaaacactactgctaaaattgcggtatataaataaggtacatcttttgaaaagaaaatcatcactttatcaaatacttcatttttactcgctaaattgtttattattctaaaaagctccatattcatttgtttttatccctttcatattggctctatcgtgttttcagtaccttatacattatctacttaaaacattaaaatttgattaaaaagttcttatgttttccttaaaaaacttatatatttttatgcctcaaacttttaagttaccgtaaaagttactattatttttgtccatgaaccttcttcgctttccacttttattcttccattatgcatttctacaatccacttagctattgaaagtccaagtccgctgcctcctttttccttagatctagatttatctacaatgtaaaacctatcaaatatattattaatttcttctttaggtattcctatacctgtatccttaacaattattctaaccttatctttatctatacaagattttatatctattgatgaattaaaaatcactgaggatatgattaaatttagattaaaataaagtatagagctttaaattttcgctatgtttgaatacagtgttgaaatatcgcaaaaaaaattataggccggattgtccacctataattctcaatataagaattttgcgaatttagattatctttttttcaaaacaaactgcttcaggtttatttacatacttgccataattagaaatgcgatgatagccttttttttcatagaatgatactgctcttttattaatcaatctggtttcaagccaaagataagagtaccctaatttttgtgcttgcttctctaagtgttgcaaaacttcacttcccactccaatcgccttagtcttagcaaacattcttttaacctcagcaacatcttcattaataggtcgtattgctccacaacctatagcctcatcatctttattatatgctactacaaataacgaacgtggaacacaaacatcatttgaattaaaagagtttttcccactgtcacccgttataaattctaaatttttagatagttcctccattaaattaatagcatcttgtgtacttggttgtgtctctataattctcataattgtatcctccttttacgtgaattaatagtgtacttattgtaacataacttataaaatttcacacaccttgattttctattttttaagtcttatatttaatatattttgttgcaacaccatcaacgtatcccttgcctaaaaatgtgcttatacagccaagatttttatgtctccaaaataaacttgttgctatgttaatttatacaattttaacactcttcctaatagaatatccattttcaatacttatttagaacacaacctaaattttacaaatattatcttcacagcttgtgctttcaaactgtatcacaacatgtgttatatgaaaatcttcattcaatatatgttcaattttatcactaatggctctagtttcgctgaccaatatatcatcaatttcaatatgcccctctaaaacaatattgttttcatctaaagtccatatatgaaaatgatgcactccctttatttcttttatttttaacaattgctccttaacatcatccatatcaaggttcacgggagttgtctgcattaaaatattgatgctttcctttaaaatattataacttgatttaagaattagcatatttataaaaatagttaaaaccgaatctatccaataaatagcaaagtactttataaaaactccagaaattattacagctaaagatgccatagcatcacttagcatatgtaaataagaggatcttacatttaagcttttctccgcaccttttttcaaaataatcacactaagaaaatttcctaaaagaccaatcaaagcaactacaattactatatttgcattgatttttttaagacttgtaagcttttctagtgcctgaactcctaaaaatattgaaattcctattaacgcagctgaatttataaaagcagccaaaatatttgctcttttatatccataggttttagctttattttttggtttctctgatattttaatagatacataacttaatattagtgaggcagtatcacttaaattgtgcagcgcatcagaaataagagaaagacttccagaaattgagcctcctataacctctgctaacgcaataataaaattaaatataataacaaagaatagtttatttttacttatggatgaaatatcatgatgatggtggtgctcatggctgtgcttctccataaaaatccctccttagctttctattttagtatgtatcaaacgtaacttatatataaaaaaaatacacgcttattagcatgtattttttaactatttctttattaagatatcattgattgatatatcgtcttctccaatatcaccaagtcctacgtatgcattatcacctttagtaattgattttgcatctttatctttatccttattaaccattccttgaaccttaacagacttaattgttttaccatctcttttaattgtaactacatctccatcacttaaagttcccttttccactttacctactgcaaatgttccttcgctattagttttctgtacatctgttaccttaaattcaaaagaatttccacaggctgtaaaactaatactcataattactaataatgctgctaaaataattttcttcatttgttgtcccccatcttgctttgttttaatatatgatagattttcctatcatgtattttatcgtatcttcttttcacatatttacaatccaatttatggatacaattatcaacctcatattgaatgctacttcttatatgttccataattaaaaggtaggctaagtcttaaacttaatctaccttttaattactatctttttagtaacatactttaccaggatttaatatattctttgaatcaaaagcaagttttatatttctcattagtgttaaattagcttctcctatttgttcattcaagtacttcttctttgcatatcctattccgtgttcacctgaaacttgtccttttagttctctagctttcttatacatgcatttaaatacttctggaagtttcttattccaactatcttctgtcatttcatcttttagtatatatacatgaagattaccgtctcctgcatgaccaaaattctttatccttatatcaaatttatcttgaagcttgtaggtatagtttataaattcagctatcttatttcttggcacacaaacatcacattcatccatttctgtagtagatgcttttatagcctcaagaaacgctcctctggctgaccatatagcttcttttctttcatctgtatcagctataaatatatccaatgcaccttcatttaaaactatatttgctgcactttcataatccttctctatttcttccgtactattaccgtcaaaagtcaataacaaatatgcatcagctgcgctatctgggaacttctttcctaagaactcttctgctgctagtattacatctctctccataaattctatagatgttggtatagtttttgattttactatctttggaacagtctctatagcttttgtaagattaggaaatggaacaagaagacttatagcttttttaggtagtggcattaactttaatatagctttagttactattccaagtgttccttctgaaccacaaattaaatcttttatactataacccgaactgtttttaactacctttcctccaagttctataatttctccgtttggaagaaccacttcaagtcctctaacataatctcttgtaactccatatttaacagctctcataccaccagcgttagtgtttatatttccacctatggttgcagatttttcacctgggtctggtggataaaacaaatcgtgctcttccacaaattctgctatctccattaaaagtactcctggctcaaccgttagagttaaattttcctcatcaatttctagtattttattcattctgcacaaatttatcattatcccaccatgtacaggaacagaagctcctacaagacctgtaccagatcctcttggaataactggaatattgttatcataagcgtacttaactatttttgaaacctcatcagcatttataacctctactaatacttcaggcattttttttactgacccaagctcatcatggctaaaatcctcactgatatcttttcctacaaaaactctatcctcttctaaaaccgattttaaatactcaatatccttctcatctatttttttatattcgtttaacattatacccctcctaaacttagcttacttttatttttttaatcaattcaggaactatttcatataaatctccaactattccatagtgtgcaacattaaatattggtgcattagcatcgctatttatagctattatacaatctgaattgttcatgccggccgtatactgaactgcacctgaaattcctattgcaaatataagtttaggcttaactgttctaccacttaatccaatttgttttttagcatctattaaacctgcttccacaagaggtcttgtacctgctacctgcgcattaagtaagccagctagcttttttataggttccatatccttctcagattttactgctcttccaacagatactataacttctgcatctgctatattttcttctacctgtttttttacaaccttcaaaacttcaatgttagaagttatatcttttaatgagcataaagttatctttccttttttttcttcacttctaactggagcattcataaccttatatcttaccgtagccaattgtggtctattattaggatttattatttgagccattatattaccaccaaaggctggtcttatttgaactaaatctgtattttccttcatatcaagtatagtacaatctgctgttaatcccgttctgaatctagcagctattcttggtgccaaggatcttccaaccgttgttgctcctactaatatggttgaaggcttattcttatttataaaatcttcaaaagcctttgtgtaaggctctattctaaaatatttaagagctgcatcatcataaacaaacacctcgtccacaccataatgaagcaattcttcagccttatccttgatattttgtccaataaatactgcatatactggatgatttattttagctgcaagttctctagccttacctataagttcataggttactggatgtatatctccatctacatgatcaacatatacagcaacacctctccaaaggcttttatctataagaaccttcttctcctctataaattcaacaactccagaaggaccttttttaacacatagtctgcacattttacaggcagctgaaatctgaaccttatctccaactctttccattgctccgaaaggacaaattttaacaagctgatctataacctgttcatttaatttattctcgttaataactaactttcccattatattcccttctccctaaacaaatttcatttcctttaattttttaaacaatttatcagaaagctctttacctgatccatcccacatctctttatgcaaatttgactctggtggaaatattctctctacttgagttggagagccatttaatccatacatattttcattcttatcttgaaagtcatttaatccatatacctttatttctctatccttcgtttctattttctttttgtaagaaggaagtcttggttgaaaaatatccttttcaactgttagaagacaagggaacttaatctctgcaatctcaagtgtatttggcatatccatttctataactattgatttctctttaacctctacaattcttctaacattagctgcatgaggcatttttagatattctcccatttcaggtccaacctgtgctgtatcaccatctgtggtttgcttaccacataaaatcaaatcaaaatttcccgctttttttattccttgagatatagtataagaggtagctaaaacatctgctcctgcaaactttctatctgacagcaaagctccagcatctgcacccatcatatatgcctcttttataacagcctttgcctgaggtggtcccatacttataaccgtaactcttcctcctaccttttcctttattcttaaagctgtttctaaagcatataaatcatacggattcattttagaatctacaccgtctctttttaaaactcctgtcttttcatcgacttctactttgcttgttccaggcacttgcttgatgcaaaccaatatttccataaattctacctccccatattttataaatatttttgctggtctactggtctgaccagtatgtatttaatataccacacttttctacacatatccatagcattcacatttattaacatatttttcatatttttagatatacgctgccattttaagctattctcaaattccactaatatcgaaaatagcttaaacccaactttatttttttataatatactcatatatcaaatccaaatgttcactcattgcattagaagctgcctttgaatcatgattttttaaagcctcaagcatggacctatgctgcttcattaaaacatttttattatcctctaccatcaaaattcttcctctagcctcactaataaaagagtccataagagaagatactgcatttaacatattaactatcagaatatttttggatgctttggctatattataatgaaattttttatcatattttccttttaaagtttcattctctgcttcggttaaattctctaaacacacttcaagctcttttacttcctcatccgtaatctttttagctgcaagagctgctgtttccacctctataattcttctaagctctagtatttgttctttattactgccgtttaacatgaatataagtaaaaatggatctattagactttcctcaaaattctctcttataaaattaccttctccatgtcttgcttccacaaaacctatcatttgaagagcgcttaacgcctcccttatacttgcacgacttactccaagttgacttacaagctctctttcagacggtaatttatctccttttttaagggtaccgtttgcaatcataattttaaattgttctattatctgttcatatacctttgtacttttaactggactaaacacaacctctatctccttaactaatcttaaatttcttatgttaattttactctataaattaaatataaacaacttttagagtttcaaacattcttatcactaaatacaatacaaaaaagactgagtgtttatcttataaaactaaacactcagtctttttatactatactttaaatttatatatttcttcttttaatttttcagctaattcctgaacctccactgtatgctgagtaaatttgtccattgtagctgtaacctcttctgttgatgctgtaacttcttctattgaagacgctgtttcctcagatatagcagaagtattttctacttgagctacaaactcttgtttttgagtctgcatactctctactgacattttaacattatcaaccttctctgttagatttgttatagacatcaatatatcattaaatatctgttctgttttttctactaccttattttgctctaaattaatattcttgttgctgtccatagccttaactgctgtatttgctttttcctgtatgttttctattattaacttaatttgttctgtagatgcttttgattgctctgcaagttttctaatttcatcagccaccacagcaaatccttttccagcctctcctgctcttgcagcttcaatagatgcattgagtgaaagtagattagtttgctctgttatttcatttatagcatctgaaatagtgctaatttcttttacactgttatccatgtcagaaactatatcaaaaaccttcattgacgcttccattgtttcactattttttgaaataagtacacttacagtatttattccctgcttacttaaattttttgtatcggaagatacgttactcatatcttctgtaattcctgctacgtcatctaactttgttgatagttctccaataccatttgctgtttctccagaattctcagctaaacttacagctgccgtggatatttcagaaactgcaagcgcaacctgtgacattgaagccaatgtttcttctgccatacttgaaagactggacgtagtatcaagcactgtgtttgacgtcttttttgcatttgataatagcatacctatattctttatcatggaattataatctctagcaagttgcccaaactcatcttttgtttttacctctataaaattagacaaatctccattagaagcctttgcaaatacatcttttagcttatttatattattagctattcctttgcttaatactaatgaaagaactgcagccactaatgccattataagaacaattatggaagtagttaataatatggatttagtatcactagttaattcactttgctctaatgtagctactaccttccagcctgttagtttatttgttttatatactccaaacttttttatatctttataggtatatgttacaaatccactatccttagtttttgtttctccccaaaatggaagttttccagcttcatttgtattaataatgcttttatttggatgtgctaaaattataccatcgccatttgcaataaacacatatcctgaatttcctattttctttgttgctattttgtctgcaagtgtagatagtgtacagtctataccaataactcctactacttttccatccttttcaactgcctttgcaattccaaccaccatgttaccagttactacatccttaaatggaggtgttattataacttcacctttagatgccactgcccttttgtaccaatctcttgtagttgcatcaaatccatctggcattttagtatcaggatacattataaatttacccgaagcagttccatagtaggcgtctaaaatatcgttgtcactattcttaactcctcctagtatttctgatattaattgtgtgttattgtcactatctatgtttatgataggtggatttttagcagtcattgaaattatatcagaaagcccatgaaaataatttattaatccatcatttacttcgttaagtgtttgtgtgcttgtaacatttaatttgctatttagaattgatttggcatagttatatgaaaaagttccaattataagtaatggaattacacaaattgatattaaactaataattaatttactacgaatactatttaaactagcccttttaaattgcattttatccctccatttatgtatatttatattaatacttttgttacatttttctacatattacgttcaaaaaatattatcttcccctcctgtttttataaacatttaatcatattatcgtttactttcaaaaatgctatagtttgaaataattccaactatagtttttattgcctcttatattaatcttttttaaagatacataaatataaaaagcttctgctttaacctattatggctaaagcagaagctttaacttacactgtttaattgtcttcttttatcaatgtatcaccaattttaacatcagaaccgctaatatctccaagcctaatagttactttgtcacctttagacgctgaatttacaaccttacttgtagatctatttataattccttttatagtaacatcatcaaccttgcttccattatctacaattctaacaacatcacccttatttaaagtgcctttatcaacacttcctactacaactacccccacatcacttgttattctcatgttagttatcttaacctgtgcttgaccagaggtgcaggacattaatgcaaaacttataattacaactaccattgctagtaaaattcttttattcattctttatagatcaccttactttttaatattatgttctccatttcccaatacgtattaaaaccattttaaataattataattgctaaaataatctttttaatttcttacctcactttgttttcccactatgtagcacatgaaaatattactacatattttgaccagtatcaatactgttttgtcatttttgtcattattatattaaaaatagctattttttttatatttttttattgtaattaaacttttatcatctatgtatttttattttttaacaaatttcctaatctaatataacaataaagcataaaaaatgtgcatcaaatacagaaacatcctgtactttatgcacatttgcgttttattatgttagattcttatgttatataactgaattaaaatattctaattcttttcgaaaaatatttactatcgtcatatttctatcatatatagcaaaaactatttttatatctctaagcttacttatattctcttttaactgctgacaaaatatttttgcaacatccgctggattatttccaaacacaccacatccaaatgcacctaaaacaatagccttgggatttttacttaaagttaattttattattttcttaattctaatattcatagcttctcttatttcactttcattaattcccctttctcttgccactctagcatttacagcaggggaggttataaacgaacataatatgggttcacttaaaaaatctccactatcatccctaaaaatgggtacatccttagaatatatcattttgtctgagtatagtggatttttttgctccttatgaaactcataaaactcttccttatattttataagacatggataaatcgaggatgctctagcaatactctcttcctgtgcattggcacctgactgaaagcctccaccaggattttttgctgaggcaaaattaagtgcaataacattaccactaattccgctgtttctcaattctattattgcattaatagtagcattatttacaacagtaagttcagccttatccaaagaagcatttaatttatttccttcttcattttttaattcacaaactaactctgtaccctctattgctctatccgtaaaagtttttatatctattttttcattggacttattaatgtagtatccatcattaattacacttaaagtttcacttgctatatttttaaagttttctcttttatttaacatttctattcaccttgcttaatatttttaaataaatctaattgtttttgtttattaccctttatggattccatttcgcgaacagttattttttcatcaccctttaaagtataagctaaagttggcgctttcggattatactttaaaatgctatcgttaagaagcttttcattgaaatttgcatagcaatacaagcaatgatgtttacaggtattgtattgtccaatgtctacactttttacacatccacacaattccctttgattgttatcttttttaagctctactccaaaatctattatttttgaaattaaatttttatctatacagctccctttttttattccataatcagataggtcaatgccttctgagcaggtttcaattattatattatgtttattagctataattgacagctgttttgctacttgcctcatactcttttcatccattttatgtatgtttaaacacctagtatttatttcagtttttttatacaaatctaaaaaacttataatgcatttatctgtatatccttctaatttatcacaaaacctttcaaaccaccgataatgatattccttagtataaaaatcatttaaaaatataggatcatatcgccatataattttttcttttccaattttttttgaaagtattctaaatgtatctataatatcttttttctttctagtcatacgttctacatcgtttctatatgaagttattgtaaattgaaaataatatttaaattcattcagctcatctaacctttttaacatcggctctgcgtctttagtccagaatacaaataaatctacagtttctttgttaagttctactttacttacttttctctcattaaaaggatttatgacgtatacgaaaccttcttttaatctattgaaaaaccattcgctataaaatgcgggtatatctgttctcctacttacacttaatatcataactcacttaacttctctcttaatctctataaatcaaaccctaactaatactctacaatggcctttttagcggcttcatctgctaaatcattatatttgctttcatagctatggcctttaactttaacaaaataaatatttagctccttgcttatgtcctctataaatttaacataaccttgcgtaaactcatttttggctttccattcacctgttgcccacaaagctatgttctttaaatcatgatatattgctacattctttgtaccaaactccttagccttagttaatgcaagctttgttgcttctaattctcctacaatattccactgatcccacgtgtcgcgacctgctgttgaataaaccttaaattcatcattttctcctaaaactataactcctgaaccatatagcttttttaatttatcataacttccatctacaaaagcaatgaattcatactcttcttttattgtatctggttctacaaaggtttttgaacttttcacttttgctttactttttattggagttatatcgtatccacttttcaatggtatattttgattaaatttaggcactggttcttcattatttatatctaaatttacacatccctctaaataaacttccgcttcttctctagttacaaaacccttatattttgcatttgggtatcctgaaacgtactgcacgcactcatcccaagttttaaatattcctgtttttctgccttcctttactgcataaaagttcttcttcgccattctaattctccttttaagtataatcattcttatataaacaaaatatgtagtaagcctctcttcctataaaaacattagaatattatattgttttataaaacgcaccataaaattttgtatacaaactcatgaataaagaaattataacataagctgatataaattagaaaacttaataaaaattaatagtgtataatagatatcatttagtgttccattcaatgcacacaaaaaatttatccaaacttaaaaagaggcaagtcctatggattagatacttgtgattagagacttacctttttgtttacatgtaacctgtgtacaacctattaataattatgtgtgtaattcatagtataagagaattgggaatcaagataatatactattagtacaaaccccttacgtttacgatattattaagtatcactatctcttttatattctaaaatatctcctggctgacattctaaagccttacagattgcttctaaagttgataaccttatagcttttgcctttccattctttagtatagaaagattcgccatggttattccaaccttatctgtaagttccgttacactcatttttcttttagcaagcataacatcaatattaattataatcgccatattattcacctcacactgttaaatcattttctgactttatatctatagcttcttgtaaaagtctttgaagaacagcagagaatactgatattaccaatgaagcaaatatagggaccattccaattattataagacctggtgcatcatctttatctgctaaaagataaacgaatggcattgttgccatatataggatactgattgcaattgtacagtgttttatattgtttaaggctttgacagaaatttgtgagaaagccttgttttcatcaatataacttaaaagtctaaaagtgctatacaatgcaatgtaaaaaggtatcactgatgcatatatacctattaaaataggatatagtacataggcataattaaggtttactgggttgttagctaaccaatataccccaaatacacacaaagcgagaataggaattccaataaaaataacagctaattttaaaaaaagtgttgttcctcggttcataaaaatcacctctcttatttattacacttatatattagcaaaccatttatcgtaaatcaataaaaaaatattctaaatcaatatatttttattttaattgctaatatgctcttgtatggataaataagggagttttcctgtataattggcaaagtttgcttttgaattcacattattctcaaaaagcatacgaaactaaaaatgccatatctaagctccaaaagacacgtatttttctcaacccatagttacgtcttttggtcttatcactctcaataagtgccttagtttcctgaatttcaagttcataccatggcataaagcatacggttatgcaaagatttctaaagtttaaacatggattaagttgggtatgtcattcctgctttttagtcttcatataatacgtcaaggttatgtctaatatattcccattgaatcaagtcctcattctgcatatcagtgatttttttctcaacttcatcaactacttcctgtataacaatatatactttatcagttattgaaatacgatggtttaacacctttgtttttggaataccattacaaagataccaaccttgagaagtacggtccaaacaggtatctgtttctttaacttttaatataattgtataaaatattcttcaaccttcatctgataatcgtagaactttattactgctgttatgtatgtatttactgtattaccttctaaaacattctttgaaggtctgctctcattctaatccccccttacaatattcctcttattacatagtgtactatatactacttgttattcaatataatttaatagttacttatgcataaaaagaatagatagatcatgcatatattaccatgtattctatctattatattagtttatatattaaccctactttctatttcatataaaccattagtttgaaaaattcatattgtcaacatagaatgtccactcacctggctgatatgtgtttccatctattaaaaacttaactgcagatatattgttcttatcaatggcagctgaagttaaattagagattggtatagttacctgttgccaccctgaatttgaagcagtaacataatccgtaagctctactggatttgtttcatttccccatacgtcacgcaatttaattcttgcttttgaatttgagtctcctagtatatagaattttaaataagttgttcttgttaaattctttcctgcattacagcctacatcgctataaggctctaatccggtactaaattcagaggttggtattgaagctccagcatatccattataagaagtgtgcttaaagtgaaatttaagtgaactgtttccctcatatttcacttgagtagacataggtacattgttccactgagaagaggcttcaatactgcttcctgagccaccccacactgagctataattccagcttccatcattattagcatcctcataggcccaattaaaacttgtaggtaccggtcccataatagctgacttatatgctgataacacatcggagtttgaattaactgtccaatctgtttccttattttcattgaaccaaataactgcatctattaaaggataacttgatcttattctgttataggcatctgtaatccaagctgccttatcaccacccttattagctgaaccaatctcaggaataaaaattggtttattatatgcctttaagacattatatgcttgtccaaagatttgatcaaaagattgccaactgcttccccacgattgagttgttccccaattatagccatcaattgaaagtatgtctacataatcatttccgggatacgctgccatatagtcagtattatttccaacactattactatttacattatacataaacttaatgttcgtggcaccttcatttctaaaaatttctacaacatgctgataagctcttttatattgatcataactatttacagttccattattatatcccgttgcccagctataccaattaccattaacctcatgcattaaccttattaccattggtttattgtagtttttaagatcacttgccatttgccttatataatcgtccttagatccattacttatttgatcatctgtaataccttgtggttcccaagttaaaataagctgtgctccgtcctcataaactgagtcaacatttgctttaaatgcattaaatgaagtagaaaaattaataaacatgtttacataatccatttttttgtcttgggcttcctgaagcttattgattgcttctgtggttggccattgaccaagccacgcaccatttctgagcggctctcctgtcgttgtagcaccaacttttaatgctccccatcctacacttgccattgttattgcagctacaattaataattttgaaattttacttttcataatattcctccttgctttttaaaagctttatattgttaaataatatttaaaagacctccaatttatttttttcaaggtggcttttaaggttattttttaacatttatactatatatatggacacatagctcatatattgcatttttattataccatgattttacatttaatcaatatatttgtagcaattattacgttaaaattttaacattacacattttgaattttttttatcaattcatccccaaaaaagtaaaaaaaggccacacattattaacaattaataaataatgcggcttcttttaataatttttagaaaattctttagtatatttatatctcttaatcaatatgatttcttctaactttttgatatcatcgttccttgatgaaaaatcattttccacttgccttcaaaacacttccatatggagctacgaagtgaatattttttattttggtttaattcattatgttttattaatccataggttgctaatacacagtcattgctcaattgctttattttaaaatctgttatctcccagtccatctcttctaagttagtcccttcatccattgcttgtccgtgaacgtatttatatatgtaccctgaactgcaaaattcagtaaagccatctgccaataattcacttgtccttgcttcacattgtcttatttcaggctttaataagtcattttcaagttttaatatatgttttttaagtaagtccatttattatccccaccttctcttttccatcaataattgctgtatactgacctgcaacaacaaccgtatattcatcaaattcatgcttatgttctttagacactctatctgaatagcatgtccaaaaagccatctgactaccatctgactaccatccgcaccttcaaagtaatatccatcaatatcttctgtattttgttgattgctactaatatgattctttttatttttcataaactctgggaaatccttcaactttaatcgcctccataaaattttctttaaatttcttcaaaatattatacactcccccctatttattcatataattactctacaccttctttataatcaaacacacagtaaaaggtaagtgttcatatatttttgtttatttttagataaacccatattctatataccattttttaaactttattttcatctattattcctattgatatttcttttcctccaaatatatcatctatttctttattattaataatggtaattcaatataatttctttattccttttaaatgttgaatatgtattcccatatgtcctataattgtttaaacaatcaataagacaacctttccgtagatacctaatccaacaaacttcatatactaacataagcaaaaatgatactatgagccacaaactccatattgataattgctgtatattaaaatcactaaaaactaatacactacatgtacaaaatatttgcccttcacgctcagataataacaatatcttattttctttaatatcatttgagtctactggttagttcttactccaaatcctattgggaataaataacattaataaatatattaatcctacataggaaaaccctaaatgcccaaacatattgtaatgtacctccacagaactaaataattatccattcaattagtcaatcataataattctttcttcatacatacgctatttgtatttcctatatatggctcgtaattttctattatttgatacccagtatttttatacaaattaatagcttcatattgttttattcctgtttctaatatggcatatttatacccttttactttacctaatttctctaactcattaactattatttttgataacccttgtcctctgttctcctttactacaaatattcgttttaattctatacactcaacattctgttccttaaatgctccacaggcgacaggtgcttcatccttgtaaataagtatcacatcatttatataatcaactctgttatgcttattatattgcttttgcaattctccatatcgttcattaaggtcatcgtttaatagttttataagtttaataaaatcaatatttttactattagtgtgtaatatatttatactcattttatgtagcctccattaatactttatttagtcataatctaaaagactgttacatttataaattaggttaatacacatatggctatttttgaatagccatacaataacatccccacatttcatctttatatgggaattccttctccatatacttttcatcaacaaatcctacattttgataacaataatgagcagttgaattattgtcaaaaacttttagtgtcactcttgatacattcaatatttcaaacgcatattttatcgcttgatttatcatttgttttccaaatccactacttcttttcgatgaatcaacaataataaaaccaagatgtacactatcattttcataatcagcttttgacattgacatgaatccaattggtgttccttttttatcaatagcagtaaatagccatcccttttcattattttcaaaactttcttgtattttattcattgattcttctgtaaaaggatatgttattaaattagcacaccacttcacaaattcttcctcactacttatccaagtaacaatatattttgcgtcacatgatctatatggtcttaaccttaccattttatatctcctttaattcatatattataaatttttattttaccttttaagaatactattcattagagtatattcttccactttcttctttcataagtataatatgtatatgatatttcaccatcaattattttatctattacagtaatatatattttatctacataaggaaattacttgttcagtaatataattctccccattaatcacatctatgttataactatctagtatctgtttatcaatagtatttgctatgattaaatacttttctgttctattactgggaaatcgtatttctaaactaaaagactttacaagtttaaaattatatttttccgctaattcaataaactgacctcttatataaaattttacatgttcatcatctttcatattcatatatatatctaaaatatcatcattttcatttggtttagggtctgaaacaaaaaatactccaccagattttactactctacttatctctttaaaagttctatcaatattgggaaagtgatgtgtaatgcgtatcttgttacaacataatcaaagacattattttcaaaaggaaactttactccgttgtaatctacaaattgtatggtcatcatgtccatgtgaaataactatactatttatatgttttaaatccacacctaacacattggcatttttaataaataaatctgaatatccaacgtctaataatagtctaacctctccatcttcaatataatatgaaacagcaggttcaccacaataatattggtcaatatatgtattatattatctactaaaactttcaacttcatatttccgcctccccttaatttaagtaatatagaaattatatcaccattttcacattgcttatactaattgtaaataagtatataattttatattaaaggatttatttttcattttcttatttaccttatctttcaccacgttttattaaaatttaatactttttgcttaaaccttaaaaattctttagaatttttctatctatgttggcaaataaaaaagcgacccatcctctcccaatttttgtatcataataaaactctccaaaaacggacacgctaaaaagcccaatattaagccatttctgacccgatacggggcatattccctatctatttttcccaaactttttatgagtttgagatgtagatggggatgtttattttaatgatacactaatcacacctatagatgttattagcttttatgcataaaaaatacacacatccatagatattaaaatccattagatatgtgtatttaaaacaactttttactacaccgttacgccaaattttctattatttactcatagcttcttcaacagcaactgctactgcaactgaagctccaaccattgggttgttacccattcctataagacccatcatttcaacgtgagctggaactgatgaagatcctgcgaattgagcatctgaatgcattcttcccatagtatcagtcataccatatgaagcaggacctgctgccatattgtctgggtgaagagttcttccagtaccaccacctgatgcaactgagaagtatttctttccttgagccatacattcttttttgtatgttcctgcaactggatgttggaatctagttgggtttgttgagtttccagttattgatacgtcaacgccttcatggtgcattattgcaacaccttctctaacgtcgtctgctccgtagcatctaacttttgctctttcaccatctgaataagcagtttctttaactattttaagttctcctgtataatagtcaaatttagtttgaacatatgtgaaaccattgattcttgagattatgaatgcagcatcttttccaagaccgtttaatataactcttaatggtttttttcttgctttgtttgctgagttagcaagtccaattgcaccttcagcagctgcaaaagattcatgtcctgctaagaatgcgaaacaatcagtttcttctcttagaagcattgcagcaagatttccgtgtccaagtccaacttttctgtcatctgcaactgaaccagggatacagaatgcttgtaatccttctcctatagcttcagcagcttcagcagctttagtacatcctttttttattgctattgcagctccaactgtgtaagcccaacatgcattttcaaagcaaattggttggatgcctttaactatattataagcgtctacgcctttttcatcgcaaacagctttagcttcttctattgaattaataccgtatttctttaatactggtaatatttggtctactcttctttcataactttcaaataatgccataacaatcttctcctcctatccttattcgtgtcttggatcgataacttttgcagcttctgcaaatcttccgtatgtacctgtagctttttctatagcttctgcaggctcgattccctttttgatgaaatccatcatttttccaaagcttacgaattcatatccgataacttcattatttttatcaagagctatgtgtttaacatatccttctgccatttcaagatatctagttcccttagctttagttccgtacatagtaccaacttggcttctaagtccttttcctaaatcttcaagacctgctcctactggaagtccaccttctgagaatgcagtttgagttcttccataagctatttgtaagaataattctctcatagctgtatttatagcatcacaaacaaggtcagtgtttaatgcttctaatatagtttttcctggaagaatttctgatgccatagcagctgaatgagtcattcctgaacatcctattgtttcaactaatgcttcctcgattacgccttctttaacatttaaagttaatttacaagcaccctgctgaggagcacaccaaccaattccgtgtgttaaacctgatatatcttttacttctttagcttgtacccattttccttcttctggtattggagctggtccatggtttggtcctttagcaacgcataccattctatcaacttctgctgaataaatcatatttatttctccttccttacaactaattatatggtttttttaacaaacatcactcaaggtaatacttgtcaacaaattgttacataacccctactattgtaacaaataagtaactgactaacaatatgtttttataaatttatcttcttatagtggtattttttgtgtaatatttaacaaagttatacccttctttctattactaggagctcagggggacaatttacttgatttataaattgggccttaaaaacattatatttcctttgatttaatttagaacatagtttataaagagcttctttttccacccttccttcctcatgtccatgatagatatttatgataataacaccatttctataaagaagttttaataattttttaacagcctcaagtgtggtctcactttttgtggttataatatggctttctcctggaagatatcctaagttaaatactgcagcttttatattttctcttatgtatttatctagattttcatgtccatcttttattaactttactattttaatattcccagaggcctctaattttctttttgtactcaaaagagctttctcttgaatatcaaaggcataaacccttcctttatctttaacaatttcacataaaaaatcggtatcattaccattaccagcagtacaatcaaccgccgtgtctcccggcttcaaaaccttcattagtatatcttttgatattccaatagaattattaaagttgtccattagttacatgcatctccagtcctaaccttttaaaacattagagatctaatacctcttgttaactttatagtaaaacatttcatattatatagtaacacaaatttttaggagtataaaatgataactgaaaagaaatataattttaattcactagctggttttagtaatgaacttttaaaagctcattatgatatatatgtaaactatattaacgatttaaataaactgtggaaagtatcctatactcctggttttagaagcgatgatactaatcactctttaatgagaagcctaaaatcaaaagaaatatatactctaaatgggataaaacttcacgaactatactttgaaaatatgacaggtaaaaatacaaagccctatggacctattttaaaggagataggaaaacaattttcttcttataacaattttatttcttatttaactgaagttgctatttccatgaagggttgggtaatactttctatagattccttagatggaaggtttcatttatttggaaatgattttcatgatacaagtgcaattttagcctctcacccactaatggttttagatgttcaggagcattcttattttaaggattttattaatgataaaggtaaatatgttgaaacttttattaataatcttgactggaaaatattaaatgataggttcaaagcctatatttttcaaaataaattaaggactctatctagatctgacggtgactttggagtatgtccctttatgtctatgcaggataccttttattaaaccattaagaacaatggaatgtaattattatccattgttcttatttttaattgactttatatatttgtctccccaaattctaaattgctctagtactggtctaaactcttctcccaaatctgttaaagaatactctaccctaggaggtatttcagaataaacatgcctccttatgagtccatatttttcaagcattcttagttgctttgtaagtgttgcttccgttatatctccaatttttcttctaagctctccgtaacgcataggaccctcatctagattatgcataattaatattgaccattttcccgaaaacaccttttgtgctgtaaaatatgggcattttccaaaaagatcattgctctcattaatagtatccatttgatacttacctccataaaaaatcgtacttgttatttcatttgtacatgttactattattgttgtatagtaaatattaacacataaatatgagaggagcaataattatgaaaagagcattagaatttttaaaagaatgtggagttttttacttagcaactaatgaaggtgaccaaccaagagttagaccttttggtgctgtttttgagtatgaaggaaaattatacattgtttcaaacaacacaaaaaaatgttttaagcaaatgatacaaaatcctaaggttgaaatttcaggtatgaataaaaaaggacaatggattcgtcttactggcgaggttgcaaatgatgataggcgagaggtaaaggagcttgcgcttgaagctgttccatctttaaaaaatatgtacagtgttgacgatggtattttcgcagttttatattttacaaaaggcgaaggaactatatgttcatttaagggcgaaaatgaaactttctcactataatttcctaaattatatctaaaaagctatttttaataattagagtactgactttaagtacagtactctattaaaagaatatctcataccattactctttcatattttgatcaattcaatgtagtttttgataaagtgatttacatttatgttttttattgttataattttgtaaaagagtattttaaccttatacttagttactctcaaaactctttttagaaaacgatttcttaattaagaaaatctaaacttactaaatggagggatatgttgtgttaaaaaaattaattaaacgcatttcactaatgctacttggaacaggcttaataattaattcagcttttttttctataagtacaagtgcaaatacttttgcaaatggtgctgacattggatggttaaaccaattagaaaataacggcgtgaagtggcaggatactaatggacaaaggaaagacgctcttcaaatcttaaaaaatcatggtataaactcagtaaggctaagagtatttgtaaacccaccttctaattttgtatggacaaaaaacgatggatcaaagtgccttttaggctatggcgatacaaaaggagtagtttatatggctcaaagggctaagaatcttggaatgaaagtaatgattgatttccattacagtgatcattttgccgatccagcttatcaagacaagccagctgcatggataaatgataattttaatcaattgcaaaaggatgtttattcccatacaagctatgtaatgacagctcttaagaatgcaggtataacgcctgattgggttcaagtaggcaatgaaactaactctggtatgctttggccggatggaaattatcgtaactttaataaatgggctgccctaattaatcaaggttatagtgcaataaaatacgtaagcccaacttcaaaggttataattcacttatcaagcggtgcaaataacagtctttatagaagtgtattcgatggtctcacaaaagccggtgctaaatttgatgtgataggcatgtcttattatccttattgggataaagttaactacacacaaaacattaacaatttaagctataatctaaatgatatggcttctcgctatcataaacaagttatgatttgtgaaattggtggtttagagaatgattctactaacacatataatatgatcaaacaggttatatctaaggtaaaagctgtaccaggcagcaatggtctaggtgtattttactgggaacccgaagcaaactcaagcgttttaccagatgcatatccattgggctcaaccagtaaagtttctaataatgttttaagatttacaaatgctataaacgcttttaattagaaatacttaaaagacaaaaaagctttgttttaaatgagcctaaaaatgtttgtttaaaacaaagctttattatattcaaatagcacctatatcacttttaagctttagagaaccttcccattaatacaagatccttatagccatcctctgcctttatggcatttttctttcttccctcttcaataaaaccaaactttttatatagagaaattgccttaaaattgtcatgaaacacttctaaatctatcttttcaattgcgttttcctctgcccattcaaaaactctttttataattaagctccctattccttttccagaatactcctttaaaattgttattccaaataatgcagtatgtcttagcatacttaagctacttctctttaaagtagcacttcctactatttttccgtccacctctacaactataaaaagctctgtattttttatgtactcctgctcgtcttcaactgtaaaattaaattcctctggtgttctctcaaagaatggagactccttaataacctgcttaactaatcgtattatttggtatgcatctccttcttctgcccttctaataactaaactttcgctttgcataactttctccccccatcaaaaatcttctaaagcttatttcaaaaaataaacctagctttcatcatttgtttttctatgtgaaatatgaaaataaaatacttcctatttcatcttcatatcaataaactttagtaagtccaccttttcacttttaggaagccattcattaagtcttgccgctgctattggaagttcccactcctctatctgttccttattaattccagttatcttcatgtagtgctttatatatcctgaataaaatctattcctaacaaactttataatcttcttttcagcacttcttttaactggtgaagcaccaaacttaagcattactgacgttcttgctatatctgctattctacttcccttacttgctgtcatccaatcgattattacttctccctcttctgttataagtacattatcaggatgaaaatccccatggcataacaaatcatcatccttaagttcatcaatataatcatatagtcttttctttatatcctcttctaataattcagttttcgagatattttctttaagcgtagtcttatagtccggcagctcaaaatctactggtttttgaattgcctcatggagctcagctaaacgctgtgcctctttttttaccttccagggcttagacgatataacttccatcattgtagtaccattaactttttcgtatataattccttttctatcatcaacttctacaagatcatataccttaggaaccaatttcatctttttagaaagattaaagctcacctcatattcattttcaatgtttttttcagggagatctttcctaaaaagctttaatattttatcctgtccatattcaaatacctcagatgtctttccctgtgcaattaattttcctttattcaatttcaatccttccttcatattacaatctttattccgtatataatgcaattttgtcacagtgtccttcatcgttatttaacgacgatgtggttataaacttttattcaaggtgacaaacccaacttctaatacttcatcctcttgtaatataaactgcttaaagaagttccataattcaatcattttttgttttaccattttaagatgtacttcctactctcataaatgttcatctctttattgcaaacataggatacgtctttagtatatgcaaagcctaagctttcaagaaccttccctgacacagcacttttcttttgttcattgctaaatttcttacttatatatctctactatccatgtaaaattaactatatgttcactaataatcttaaaaccaagtgacttaacatagtcttttagctcttctaagtcagtataatatctaccatctattacctcccataaatcttgccttttcttagataatagcttatttctacattcctctttttcagctttgtttttgaacatatagtctccaataattatccttccatcatcttttaaatacccaatcatattcttaatagcctcttttttctcttcactattcagtccatgaaaagcgtaagtagttacaacaacccctgcccattttcctataaacggcttgtccgaaaaacttcctattttaaactttatatgtttgtattttcttttagcaccttcaagcatttctaaacttttatcaattcctaaagcttctatttctttacttaattctccacataaatttcctgttccacagcccatatcaaccacagttttagccttatacttaattatcctttttctaatttccgccaaagtttcctcgtacttttcaaacagaccaagttcatcattttttttctctttcaccatcctatcaaatcttgatgccttatccacatttatcaccaatcctttgattaagttttctatactttaagaattatgttacaaagaccaagccgactatttagttacttagtatactcttcattagtttactattcaagagcatagttttttaatgcctttttcaaaattatgtgattaaaaaatgatatattcacatattcatctatatttgataccatcatttcaattttaaacatcttttcctgccatataggatcttccttaatcttattatcctgctggagcgcccaaaaagttctaattccaagcaccttaataatttcaacttcaaatcctttgcaccactttttaatatcctctagcttataatatgaaaccttcccaaaacctaaaacctctattattccgccatttaaaagcttctccgcttcatcaatattattttcaaaaacaaccttttgcattattcttcctgcatgattatgcttaacaagagatattattccccctggtttaagaattcttaaaaactctttaaatatttcctccctctcttttgcatactcaaagacattgtgacaaagtataacatcaaaataattatctttctgactttttaacgctttaaggtctccgacaatttgaatataatcattttcttgtattctagcctcaaccaactcactgtttggctctattgcaattaccatattattacttgcaaaatgatttgctgtaataccaaagccgcttccaaaatcaagaactttagaagtttttattttatctaactgctgccataaaactctgtaaaataatattccccaaggtttttttatattatctaaatagtttttcaaattattgttcactatgtacttactcccatctatattaagcaaggaatgggttaatccccatcccttataaattaatagttttcacttaatatttcaaaatatgcttgaggatgaagacatgctggacaaacttttggagcagtcttcccctcaaatatatatccacattttatacatttccaaaacttaacttcgtctttttcaaataccttattctcttcaatattttttagaagagcgttgtatcttttctcatgctctttttctactgctgctataagtctaaaggcagccgctactcccttaaaaccttcgtcctctgctgtctttgcaaaactaggatataaatctgtccattcttcattttctcctttagcagctgcaattaggttcttttttgtatcacctaatgtagttggataggaagctccatttatttctacagcttcatcatctagtccttcacttagaaacttaaaaaaacgctttgcatgcattctttcgttctctgccgtctctaaaaatatgttggatatttgaacatacccttccttcttagctgtatttgaataaaaagtatatctgtttctagcctgtgactctcctgcaaatgctttcattaaattttctgctgtctttgtacctttaagtgatttcatataatacctcctaaaatgtgttactatataattttacaccatttttacatttttttccaatagtttttttaattctttaactttattaatagcagcttcttctagaatatcctccttttcaaaattcaaaccatatttcaattccgcttctcttgataaatctataacatacgaacgagttggtgtttcacttatctctattgacagtaagatccatcccttttctgcaagaagagctttcatattatctttaaaaaacttacacatattctccaaggtaggattcagagttataaaaggttcaattctatttatatatgaatcctgatattttttcatatatttttctacatacctctcaacatcattaaagataacgaaaccagtatgaaactttatagtgtagattgtaatttcccaggtatgaggatgctcctctcctagcactccgtttatgaatattgaatgcgaagcattaaggtaaaatttaaatttatattcgtcatactgcaaattaaattcccccccatagctttattttttctgctgcagatctaacgttcatgataattttcccctcttctctttccttaacagaaattccatatatgaatgtgtagtttgttttatgcttaacgttatccataaacttaaatgcctcttccctatttgtattaagctttataattgcgaatttgttgtaatcaattctagaaacaatatcattgccataaaaaacttttccagcttcagaaattacctcctctgaggttggaaaagcttcaactacaataacagctattggcataaatatacccatatttattttatctaaaattttataaaaaaactccatgttgtaaacacctgttaaagaatctcttatacttgctttttttaaagattcctcagttcctgatagcttttctataaaactttcaatatgaagatttttatatcttatggttttttctaaatctaaaatatttttggttgcaaaatatatatgaagaagaaaggcacaagagattataattaaaattaaagtaatcaagctagaaaatataataagtctttctctatgctcatcaatacaggttgcacgaataagataatcttttgaaacagctgtacctaaggtatataacttttcacctgatttaaaggggtaccaagcatcaatttccttaccacccgagccttttcttatcacctcatcatagccacttccaccacttaaaatacttcttttcatataagaaagattttctcctccattatactctaaactaaaaaagaactgctttaagcttttatttttatatctcgatgtattagtatcatttctttcaaaaacaactccatctttgctatatagaaatacatagttgttcttagaatttgtctcctttttaagaatatcatctacaacctttttctcatctgaagcctttaaagcatactgtactctatctccaatttcgttggtttttaaatactgctgttccataaaaaactttattatattacttttatttatatttatttcttttataatcgaataccaaaagatacagattaaaaatacacttactacaaatattaaaaataccttcagtatgaatttctttttatcttccatcaatcattcaccaaacgccttattttatttattcctttacctatcattctaaaatctgattgtataacctttaaaaacgcagtccattcatcattaagagtaagtgttttccacttactcttaatttttatgctgttaattattcctgcaaaacgtatccaaaacaccacaaaattataaataggcattaaaaatatatagccccatctagctttataatattctcttatacttttatattccttaagatatatcctcacatttaaataaaacaaaaatgtagacagtacgtagagcatatatattattacaagagatcctacaacaagcttcactgggtagttcataaaaaataaaaatattatagcaaaataccatatcattctagggaaagcaaaggtatgatcatacataacaacccttatcataaaattatgaaaaaaacctaaaggagaattcattttatttttaaaaaacatatgagaaacctcaatttctcccctctgccacctctgcctttgcgtataaagcttatttaaattctctattggatctacaaaaaatatagaattttcacaaagatacaccttcttttttaaaagccttctcacctgaaaggttatatgcgtatcctcacaaacagttttgctgttatagagctgtgtttttaaaatagtagactttctaaaggctgaaaacgcaccagaaagagtgtatatactatttatctctgattcgaagtttcttcccgctaaaaatgcctgagcatactcaaagaattcgcatctccttattaactttaaaaaccttttatgagttttttctattccttctatatcacttaaaattgctccagtcatacagtgaatattcggatttttctcaaagcgaactatcatgttttttattgcatcataatgaagttttccatcactatctatatgaattatatatttacctgcactattaaaaagtgccatattaagagcttttgactttccctgctttgaattcatatacctcatagaaagtccacaaaactctttttgacattgagaaaaaacctgaaagctgtcatcactgctcatgttatttacaaggattaagtctataagtcttgtggggtaactgcaattatatatagattctatacatccctttaaggtagcttcagaattgtatataggtattatcaaagttatttctggaagcgttccaatgaagccttctctattagagttaaaactctttttaaccaatataaaaaagcctccgaaagcggggattatctccataattagtggtattataatccatgccatccaaaatatcaattcccttaaggtcttacttagtagtatactcatatgaaacattacctaccttttgcctttttatatgagattttgtaaacacatgaaaatatagaattatagaaagaatataaaaaataagtcttccaaatatagtgtgtgcgaaataaaaagtgctatctccataatagtgtactatgctgcatataataacaattctaagtatatttgcagcaaaaatccaaagtgcgcctataactgtgtacattattttttcaagtgtattatacagtggaaaaaaccataaaagtgccatgtaggcaaaaatctctataactccagaacattcatagtctatatacatagatatattgcagttattagtatttataaatataagtccatagtcagagaaggatttaaaataccctacagcatctccaataagcccagaaaccaccgttacccaaagcgtcaaaagcataactgcaaatttttgaaaaaatataatcatgaaaaaaaatagcccaacagctcctattaaaaacttaaaaaaatgcagctttgctcttactaaaaccgttaataaatatatccaaaatataaataaagagactacaagcaccctcatatagccgcccttagattgtttcttcttttaatcataaatacacctgatatagctattatgctgcaaattaaaacgctaaaatacggtcctgtacttccaacctgaaaagcagcatatctatctcccaaatctggtattctgagcttcacattttcaattcctaccgcaccttgggttctaaattctgataaaggtattttaaattcagcttgatcactggtctttccatcactattatttccacgcacaatatacccatctgtagaaactgccgtgtaacctccatccatatcaaagattgtaactcttccagtttgtggcctgtcgggagcaatctgcaaatgtttctgaactgtattactatcattaaaggaacattctataacataataacttaagccctgaccacctcgcgttcccatttttatatacaaatatagataattgttatcagtatattccctaagctgatgtacctgttctggtgtaacacttggataccttaaataagttattggcttatcctcccaatcatcaaaatatccatctaaagttattccattagatgcagcattaacacttaagggcagtaaaatcaaggcagctataaacaaactaaaaaaccttttaagtattcttttcaatacattcacccttccccttaaatacaaaaacaattaatataattagcccaattaaccccattaaagataaagctatacccttttttaaatatggataagttacagaaatgtttgtaacacctttttcccgtacatttagaagattttgatccatatatattttcttatcactcatatatgcatctaaaaatgcaatggttgtattcacactttttttaggagaatttatctttattgaatttttattataacttaccttaagaggaacaatttcacgtttaggaacatttgtaagttcctttcctattatttcattcataatatcaagtgacttactatcttcattagtcataccattaaacataagattaaatccaagaaaatacacatttttattatctttaattccagacgctaaaaaagcaattttcttatcatttatccaagaaaagccctttacattttgagtatttgtaagatataccgtattccattttttatactcttctttaaattttacatctgccacatacctttctttattaaaaaataaatcaggcattttattgtcaaaaactattggctctgaaatcacacctaagaatatcattctatctgtaatattatctgtaggtattctattcatatctacaattactctaacaccttttttgcttaacttttttactataccttctgcttttgatctattattataggaaaatcctgataaataaataatcttatatttcataagatcattcaatgaatagtcttcaagattatttgagcttcctattttaaatgaaggatataaaagttgtatctcctttgccgacttccctatacaaagcccctcgtattttgtaataacgccaaaggctttaggtgtgctcttatgaaatatataactgtcagcattttcaaaacaaagcttataaccagaaagctttgcaccataatctatatcactaaagctttttctattatcctttatcacagattttcttagaactacggtatcacaacccatttcaagagaccgatcaaacatatacttgtaatatccattttcaagagcagtatttaataaaacaatattgcttgatgtcgcagccccctgccatgcccatccatatgaataagctgatttatccttgccattacaaatataatatgaggcgtaagaggcaaaggtgctatcatccataagtgatattctttgctttgttacagccttagccttagaaagtacctttatagcctctaagttttttccttttggataaagtgaaaatctaaaagatagagaactatcagctattatgataattaaaactattagcttaatatatctctttaagcttttccagtttagaaggcttattgtaaataaagcgtaagctataggtgcaaatcttatcatccaaaacagttgatttagtggaagcttagacactataggcaaaaatgcagtagtgcttcctaaaaaaatgacaactgaagttataaatcccggtaagctcttcttttttgaaagtattatacccaaaacagccacaacaaatatagataaaccataataaaacataccatttcttccctcttgcgtaagccgtataaatgggtttaatgcatctgtaaattttgcactaaaaaatttcataacttcgcttgttgcctcgctgtccattgaagtaagtccgcctttaagtgctggataaagccaaatcccacaaattgcaattcctattcccattgctgttaaacactgaagaggctttataacttttttaaatataatggagtaaatgaatagaaacacgaatgacgcagttaccaccattgcagctaccataagatgcgtcatagtaataagcgtcataaataatgtcatcggtaatattgaccacttcctgccataattcacaaaatcccacaagaagtaaaatagatatggcaataaagctgttattaaagctctcggaatatttccctcatagaaaagcacctttaagttctcaggaagaaaaaaccataatattcctaaaactaatgaaatgaatatacttctttctcttatcccccaaataagccatcctaaggctcctataaagaaaatcaagctaataaaaataagatatgccccactaacatttcctcttaccaaaaactcacatgctgcaagtaaataataagaaaaaggagcccaatacctaaagggctgtattccgttataccagtaatttgtaaaaagcggataaagattaccttgccttatactcttatacaaaaaatccgctttaaataagtgtccataagtatctaccccccaaggatatccttcaatattttttaaataaaccattaatgaagttcctaaaaacataataataaatagtgaaattaaaactcttaagcttacgttatagcttttttcaattttctttttcttctcttctttcggtttattttcttctacatattttatctctacctctggcatattctttcttattattttttcagctttttgaaattttctaactaattcctcttcacatacactaataattccatctaaagttaaccttcttagcttgttatactgtctcttctcttctacatccttacaattgtttacaacataaactcttgaaggattttcacttatttctagtctcgtaagctcaacctttttttcgttaaacacttttgtaatttccttaaacaaaaagtttcctatattctctaacgtaggctcaagtttgtcaaaaggagatattttattaagctcctgtgcttcatatcttcttaaataatcattgactaatttttcaattttgttataaagaaaaaattcatcatcggctatccttatttttattgcaatcataaaagtgtgagaatgcacatttcctcttttgttatttattaaaacgctatgggatgcatttaacttaaatttatagacatatcccctaaattccactcattacctcccataattgtattttaattacataatatcattaaaatgaaaaacaatcaattagcttaaaaacttttttcgtattaagaagtatattaaatcctcatataaaatataatatgactaacaaagggggataactatgagacatatttataatattgtaagtatatataagagggatattaaaagcattataaaaaatccaatagcccttttgattataggagggctttgtgtaattccatctctatatgcttgggtaaatatacaagcttgctggaatccctatgaacacaccagcagtattcctgttgctgtagtaaacaacgacaaaggtggttcctttcgcggaaaatacttgaatatgggaaatcaaattgtagataatttaaaaaagaatcataaaataggttgggtatttgtaaacacaagaaatgcaaatatgggtattatcgatggcagttacaccgctatgattgaaattccagaaaatttcactggaagatttacaagtatacttaaaactcccccaaaaaaacctgaaattatatataaggtaaatacaaaactaaaccctgtggcaggaaaaataacaggagtagctaaagataccttgaccaacgaaatcacaactgaatttatagctactgtaaataaagctatattttcttctttaaacaaagtaggcggagaagctgaaaaaaataaaaacaatatactgaaattaaaaaataatataatcgatgtaaataataatatggatcttatactatcgctgctaaacagtataaacaataattctaacaacctaagtatgtttttaacacaattaaaagccactatcccaactataaatagcagcttaagtatgatatctaaaaataacactgacaacaaaaccatgattttaaacactcaaaacaccttaaataattcttttaataacatagctctaaatttaaacaatgctgaagctgcaagctatagaattaaaaatcttactgatgcacttaacacaaatttttcgagtagtaacgcctctataatttactctgacatatctaaaataaacactgagctagataacctaaataactcaatttcatcgataatagaatttctgcaaaatataagcgcaacctcacccaatgagtctttagctaatatgcttgtatcactaaaaaatactcaaggttcaattgcttcacaaaaatctgatataaacaatcttcaaaaacagcttcttagcacaaataacctaaataaagctttagttgcttcaataacaaataggtcttctaccatgaacaaagatctcataaacactaatactagctataatggcagcgttaaagcttctttaaattcaatatcacaaaatttagttaatgtaactaacgacgcctcctctattctaggaactgcacaagatttaaataatggcataaataacttacttcaaacttctatagatgggagcaatctatcttcaaaagtgtctttagatctaaaaaatagacttcttcagtttaaagatataatttcagctttaagcagtaagcttcaggagactaataataacgacttaattcaaattataagcatcctccagagcaatcctgattttatgggaaattttatttccactccctttagtataaaggatgaatccatttacagcataccaaattacggttctggtatggcacctgtatacacagtacttgcaatttgggttggaactttgctccttgtatccttactaaaaacaagagttccggattctcaaggattacatatactaaccttacgtgaaaagcactttggaaaaatgttaacctttataaccctaagcttaatacagtcttttatagtatctcttggtgatatactacttctaaaaatttatactgtaaatcctgctcttttaattgcctttgcactgatgtcaggcttcaccttctgtgtaatagtttttaccttagtatctactttaggcaatataggaaaagcaataagtattatatttttaataatacaaattgcaggcagcggttctacttatccaatacaggttgacccattatttttcagaatccttcaacctatgctaccttttacctatagcgttggtggatttagagaagctatagctggacctttaataagcagcgttatgcttgattttactgccttaatacttatttcagttgtattcatattttttggtttcttctttaaaatacctcttcacaggccaatttcaaaatttgaagacggttttaaaaaatcaggcgttggtgaataaatttaggaggtaacttcatgaaaaaaattttcaaaatatttttaagagatttaaaaagcattaaaagaagcccttctgctattggtatgatagttggcctatgctttttaccttccctatatgcttggataaacataaatgcttgctgggatccttatgcaaatacaggtaatattccgattgctgttgtaaatgaagacgaaggtgctatttttaataataaaagaataaatgcaggaaatgaaattgtatctgagcttagaaaaaacaaatctattaagtggatatttgtggatgaatggcagggaaactatggattaaatgaaggaaagtattatgcccttttagacatcccccgcaatttttcaagtggacttacaagtctaacaacaacaactccagaaaaaccttctataatatataggagtaatgaaaaattaaatgcaatagcttcaaaaataacaaattcagctaaggataaagttgctcaggagataaaaacaagtttcgtaaatacagttacaaaagaaaccttaacattaataaaatccaataaaaacattatgaataaatcaaatattattcagcttaaggacactataaatgaagcatctaaaaatcttataaacacacaaaattacatacaaactgcaaataaaagctctcaggatataagcagttacttatcaaagcttcaaggaactttgccaaaactaacagaccagattaacaatcttcaaaatgctgcccaaagcagtaaaaatctaatttcagctacaaaacaaacccttattacaacctccagtgatttaaataacgatatggttgaaattcaagctgaaaatggtcaatttcagggtattttatctggaatgaagaatacaacttcttactcaaatctagagcaactaaatagcataaataattcccttgatagcaatttaaaatccacaataaataatctacaggcaatatctaagactaacactatacctaatgcaaattccataataggttatcttcaaaatgcagacgccttagcagctaatacaaaaaattctctatctcagcttaaaagttctattgataacaatgcaccaaaggatgcaataaacagccaaattgattcaatttctgccttaagcaatgagctttcaaacgacatgctaaatatatcaaatggcttttattcttctgttcttcctcttttaaataatatgggagataacttaaatggaaatttaactaatataagtacacttttagaaagcacaaaagtattaattcctcagctagatgctttagcaaattacggtaaggctacaagtacactttccataaatcaagcaaacgatataaacagtaagctttcatcactttcaggagaacttaatagactcagtggcaaaatgaattctttaagtgattcagatttaaatgatataataaaacttttatctatgaacactaatgaattagcaagttttatatcctctcctctaaccacaagagaagtggatatttacggagaaggagtctttggagttggcttaacacccttttactcagtccttgctatatgggtaggagtattacttctctcctcaatgcttacaacagaatttaaaaatttaagtggaagagagcatcttaacatttggcaggaacactttggcaaaatgcttttatttttggtattatcccttattcaaaccaccatcataatacttggtgataagtatatacttcatgtaaatcctcaaaacatgcttttactcatgtgttttggctgggtatgttctgtcacctttacctttattatattcactctagttgcgatatttggaaatgtaggcaaagcaatagccgttgtaatgatggtctttcagattgcaggctccggaggtatatatccaatacaaacaaatccaaaaatctttggtatattagaacctctttggccatttacctacggaataaatggttttagagaagccatatcaggtcctatatggaataatgtctacagcaatctcagaaatctaggcttctttattatttttttcttttttctaactattttaaaaagaccctttcacaaacttacaagagctatggaacataaatttaaggaatcccaactataataaaaactctccttaaaggagagtttttattattttgttaaatatactacaactctattaatccaaaatgttcctgttccatctgtaaccacatataatctatcaaaagttttagactgatcataacctgaagtcataaattgtgtatttaactttttaacagctttttttagtgtatcaatatcattagactttgtggaggtgtattctttatatactcctgctaccttataaacagttccattttgtgctgtatataatcctccgttattataatcataaagcttaatcaaattattttttgcctgttcctctgtcgcctccctatctgcaacgtaatttccctgaagatctatagcatcaaatacattaccagttattttatcccccgcatcattatatgcgtatataattcctgtaggattttcaatcttatttacctcttgattcaatttatctgatgaattccaatccattttagtcttatctttatcaaatgcaggctgtggtatattggaataatctataaaatccactggctttggagtacttccatctgctgttttaactattctaacctcgattgcctctattctaagccctttaccatctgttcctgcttcttgtccatcacttacccaatcttgccagcctatgttttgcacatgcgctctatattgaacactgtagcctggcaagttctctagtgcaatctttattgcttcaactctaaatcctctaccgtctgttcctgcctcttctccatcctgcactgcctcttgccaacctatattttctacatgtccttggtactttatatgtgctccttctggtgcatttgttaaattaagctttaatgcctcaactctaagtcccttaccttctgttcctgatatttgtccattttcaacagcatcctgccaacccacattttgaacatgaccagcatagcttactcctacagttgaattatcacttactttaactatcttaacctcaagtgcttctattctaaatcctttaccatctgttcctgcttcttgtccatcacttacccaatcttgccaacctatattttgtacatgtgctctatactgaacactataacctggcatattcttaagctttatcctaagtgcttctactcttaaccctttaccatctgttcctgcctcttctccatcttgcttccaatcctgccaacctatgttctgtacatgaccttggtactgtatatgcgctccttccggcgcattagttaaattaagctttaacgcctcaattctaagtcctttaccatctgttcctgcttcttgtccattttctacagcaccttgccaacctatattttctacatgcgtagcataagacacacctaactctgtatctgctttatagcttttatctgttggcattcccaatataaaaacaaaagcagctgctgctataaatcctataattttattacttttcatcttgtttcctccttgaatgaattttattgtcaacatttatattttataattgttattttcctttttcaataactttttgtattaatgtaattaatagggttgtattgagcaaatataaaaacagcatcagtatcaatgctgtttctacaattcaaacctaaattttcttcattctctcaattttatttttaactgcatcctttaaatatttcatttgtgaagtattgtcctcatatgcactctcatacttcacttcatcccccacatctataatatacgatcttgttggtgtctcacttatttctatagacaaaagcacccatccatttttcgaaagaagttttcctagcgtttctttaaagtatacacatatattttcaagtgtaggatttattttattaaaaggttccgtatcattcaaataaatatcttgaaatccttgaagatatttatctatctttttctctacatcgttaaatataacgaagctatcatttatttttattgtattaatagtaatttcccaagtgtgaggatgcttatctccaagcactccatttaaaaatatagaatgtgccgcattaagatagaacttaaatctatattgattgtatttcaatttctcattcctcccttctcaccaaaatattttcctaaaaataaataaatatattttctcataaaatacataacaaagaatggtataactattgacgctcctttgctaagcaaaaaatttatatcttttccaaggaaataaaacactctaatataagacaaatatacaataaaatctgccatcaaaagtccaaacaagaaggttataaaatatactccaattcctaaaatgccatattccacattaaaaacagattttgaggctaaaagataatgtattataaatccaattataatccctatagtattggcataaactattcctacatttaaaaaactcataattacccaaactgctgctatatctattactgttacaaaaatagagtatgaaagatattttattatagagccgtaccgattaaatttcttttttagattctccatagcctgttcctttctctaaagccattcttgaagcttccaatatacttaataaactctcttcttcgtttaatttcacctttagttcagctcttatctttccaccttcatatttcttcactacattttctctcattttatcaagcctttttaaagcgtctttttcagtagtgttagtcataacaattacaaattcattgtcatccgttcttgaaattatatcagtatcactacaatttgccttaaaaacctctgctgatgaaatgataaattcttctctatcttcatccttatgaaaatcgccctctaataaaattgctgctacagatataggaagaaatgctcctcccttcattccttttataactctataaagaaactccttgttataaactcccgtaatggtatcctttgtcaccgccatttcagctatttctctacactggttaacttctaaaacgagttcctctgtctgaagatttttctttttaagctgattttctaacttctctatttttttataatctgaaaacatgcaaaacacaaataagcttgatatgactataataactgctgtaaacatcgatgaccaaacataggttataacttcatgctgactaagttttgtttctcgtctaatatagttttcagaagcagccattccaactaagtatttttcatctccgaccttaaaaaaactccagcttataatctctttatcattcttaatacctttcttaacctcagaatatccgcttataccattctccattaggcttttagcatcacttaaatcttctcctccgttatattcccaaagctcaaaaactttatcaatactcctatttttgtattttgcagtactttcagtatttctctcaaaaacaacatacttagtattatagaagaacacatacttgtctttagaattattttctttttgtagaacattctttataactttttcttctaccttcttaattggcattttctcatcacttatataattttccatgctgtcataaaccttatctgctaaacgctcagtgctatcatattgactataagaatatgcctttagtatattttcttcatggtttttcgtctcaaaaaatacacaccataaacaaactgctatagatatcaaacttaacatgaatataataaatactttaaataaaaaacttttttctcttttcttctccataatcaatcctctaaaacgggttctaccccttttcttatttttttaagccttaaagtaagttttacactgttaatggctgtaattagaaccttcattttgctcactccacctttaaaatcatatctaagtgtgaaaggaacttctttaaatacagctccgcaaatattaagcttgtacaagagctctaccatacaagtaaaaccactttcctctataaaactttcaccaaaaactttaaatgcagttttaagtgcagaggttctataaagtctataaccgcaagtataatctctaacatttttcactcctaaaaagatagtataaacaaatctagctccatagcttgcagttagtctaaaaaagggaactcccttaacacatgatcctttttgataccttgatgcaattactacatctgtcttctccattttttctatcatactgaatacgtatctaggatcttgagtattatcgcaatccataatacaaacatatttgctgtcagatctcttttccatgacatactttattcctgtatttattgcctctccaagtcctttatttttatcatgctttataagataaaaattatcatatttcctttctagctctctacctataacttctgttttatccttgcttccatcatctataacaaatatgtttaaactaagctcatacttatactttaaatccttgcaaagctgctgccatcttttcacaagcttttgtatattttcttcttcattgtaagctggaagtaccactgaaatctcattcattatttaccacctgccttagcttatttaatactttaaatacaacactaaaatctcttttaaatacacctaaaaagtttctccactcatcagttaaattaagagttttccagtttccctgaagttgtatgctatttataatgccacaaaatcttatccaaaacacaccaaagttatacataggcattaaaaatattaagtagaactttttcgcatagtatgatctaacctctttatatttctttaaataagatattacattgagataaaacaaaaatgcagataatgaatatagaagataaattacagcaaccgaacccaccacaagataaattggatagttcataaaaaccaagaatataagtgcaaaataccatatcattctgggaaaggcaaaggtatgatcatacataagagttcttaccatgaaatcactgacaaaacctttgccaaacttaagtccgtctcttaaaaacatatgagaaacttctagttctcctctttgccatctttgacgctgagtatatagtttattaaaaccttcaattggatctacaaaaaataatgcattctcacacaaatataccttttgatttaaaagcttctttacctgaaaagttatttgagtatcttcacttacagtttcactattataaagctgagtttttaggattgttgactttctaaaggctgaaaaagctcctgagagagtatatatgcttcccacctcagattcaaaatttcttccagctaaaaaagcctgagcatattcaaagaactcacattttcttaaaagcttaaaaaaacttcccttagtcttttcaattaactccttgtctgttaaaattacacccgtcatgcagtgaacatgtggatttccttcaaaacgtgttaccatattttttatagcatccttatgaagcttaccatcactgtcaatgtggattatatatttcccgctgctgttaaacagtgccatattaagtgccttagatttaccttgttttgaattcatatatcttagagataaaccatcaaactccttttgacatcttgtaaaaatcttaaaactgttatctgaactctggttatcaactaacattacatcaataaattcagagggatagtccgaattatatatagattcaatgcaacctttaagagtatcttctgaattatacacaggaacaataatagtaatttggggcaatttgcctgaaaaggctttatcttttattgaaagtctctttcttaaaagtattataaaaccaccaagtgcaggaactatttccatcaaaaaaggaatgataatccatgccatccaaaagaccatttctctataggttttgcccagcatcatttccataagaaacattacctactttctgactttttatttgagactttgtaaatacataaaaatataaaattatagataatacataaaaaactattcttccaaatatagtgtgcgcaaagtaatacatattgtttccaaaagcgtgaaccagtgcacaaattataaatattctaagggtattagccataaatatccaagctactcctgctatgttatacattaccttctcaagtgtagtatacagtggaaaaaaccacaaaagagcagtaaaggcaagtatttcaataacacctgagcactcataatcaatatacatggatatattaacactgccctttgttattagtataagagcatattggtaatacgcctcgtaataacctgtggaatttcctattatcccagccactgctgtaacagccttgctcaatatcccaacaagatatggctgaagaaatatcatcataaaaaagaacattccaacagatccaataagaaacttaaaaaaatgcaactttgctctgactaatagcgatatcacatatatccataaaacaaataaaactcctaataatatgttcatataagctttcttctctttcttctataaaagtaaaatccaaacgcagccacagagcttgacatagcaattcccatataaggataggtgcttccaacttgaaatactatttgttgatatccaagattaggaaattgcaaattcaaagtaaacatctttccactatccttttgaaattcggacaatggtattctaaattcagcttcatcactagtttttccatctgaattgcttcctctagtaacataaccgtcatcggaaattttagtataccctccattagcatcaaaaacagatactctacctgttgtggggctatctggagaaaattgtagttgcttcttttcaccattatcaacattaaaatatataatatagtggttaatttgctgtcctcctgtaactcccatttttatatgcaaatataaatttttatcatccgaataccactttacaatatgaacctgtcctggactttcccaatcatacttaatttgtgcatacggcttgtctgtccagtcatcatagtaaccatctaaaattacaccattcgactctgcacgaaccgtatatggtctcactattataacttcaattactaaaaacattatcgtcaagaacttaattactttcttcactgtgtcttccccctctgtaaacaaccataattagtactaaaaatcccaaaattcccattaaggataaaatcatcccttttgctaagtaaggataagtaacctgaatctctgtttttcctttacctacctttaaaagattctgatcagaataaattttatctttacttttataagaatctagaaatgctaatgttgtattaacatccttatctcttgagtctataacaatagaattcttactatattttacattcaaaggaactatggttcttgtaggagtttctttattagatcccataacgttatccataatgcttaaagccccattatcttcatttgtcattgcatgaaacattaaattaaatccaacaaaagtaatatttttgttatctccagtaccctttcccataaatgttagctttttatcctttatccacgagaaaccttttatatctgaaacattttgaagatatactgtattccattttgtatattcctttttaaaagctccgcttacatatttctcattttcgtaaaataaatccggaagctttttgtcaaaagtaattggctgagctgttacacctaaaaagctcatcctatttgtggtttcatctgaaggaatcctattcatatcaattactaccttaatacccattttacttaatttagaaatcatattttcagctttagccttatttttataattaaatccagaaagataaataatcttatatttctgaagctcctctaacctgtagtcatcaatactgtaagaagccccagacttaaagcctgtatactctagtggtatttcttctgcagaacgccctatactaatcccataatattttgttacaaccccaaaggtttttggtgtttccctatggtacacatagccctctacagtttcattatataagaaataatttagcttttttgccgcctcatcaataagcttaaaactgctctttttcttctcaagtgaagcctttcttataactaccgtatcgcatcccatttcaatggatctgtcaaacatgtagttataatatccattttcgagagctgtatttaaaagcactatatttttagaggttgatgcaccttgccaagcccatccataagaataagccgtttccttgccaatgcttggaatataaaatgacggatatgaaccaaacatactgctatctaaaagagcaattctctgatttgtaaccttttttgcactttcaattatgctttcaacggtattactcttttctgaaggaaacagtacaaaattaaaggataatgagctatctagtattattaatgacaaaaatattgccataaagacctttttacattttccccaattaataagactcataataaataatccataggctataggcgtaaatctcatcatccacaaaagctgatttaaaggtaattttaaaagtactggaacaaatgcagtggttgtccctaaaaatactattattactgtaagaaaacctggaacactcttcttatttgaaagaaatattccaagacaagaaattacaaaaatcgacactccgtagtaaaaaaatccgcttcttcctgcagctgttagccttataagtggatcaagcgaggtagtaaaaggtgtgcttaaagctctcataacttctgaggttgaatcagtatccattgatacaagacctcccttaagtgctggataaagccatattcccgctatagcaaaacataaaagcatggctgctatactctgaatagatcttaaaaatttcttagacagaactgcgtatataagcaaaaatataaaagtcgtaatgccaagcatcgctgcaaccattaaatggcacattattattagaagcataatacctgccatagcaataatggaagccttctttcccttttcaacaaagccccataaaaaataaaacaaatacggtataagtgctgctataacaactctgggtatatttccctcaaagaaaaatattctgatgttttctggtaaaaggaaccataatactccaaaaataaagcatataaaaactctcttttctctatttccccataaaagccatccaaaagctcctacaaaaaacataagtcctataaacataatgtatgcctgcgatacatttccacctgttaaaaattcaagcaaagcaaatatataataagggaaaggtgcccagtatctaaatggctgtattccattgtaccagagcttggtaaacagtggatacatatttccatccttaagactcctatacaaaaaatcagctttgaatatgtgtccataagtatctattccccaaggatatcccttttcttttgccatgtatagacttaataaaactgccaaaactccaaagagaagtgctgacgctaaaacctttaatttagtacggtctcttttaatggtcttctctctagtctcttctaattctttgtgaacaatttttctctttaaaatttcaacattatcttttataatctcatctgtagtagaattaattaggctcttcattataagtgtttttatattattatcatagcctttcttcttcttactgtcttcaaaaaccacattttctctatgatgattcacaacatagactctagccggtgtctcacttatctcaagtttatttaaaaaaatgccctttagtttaagcctatctttcagttcatcaaaaaagaaatctcctatattctccagtatagggtcaactttatcaaaaggtttaaccttattaagttcttttccactgtatatgcttaaaaactcactaactttcctttccacctcatcatacaaaagcatatcttcactgtctatcttaacaaaaagagatatcacaaaggtatgcgagtgcatgcttcccctaacattatcaatgataacgctgtgtgaagcatttaaattaaatttatacaaatatccttcaaagtccaattttacctcctatcacaggttaagaataccaataacctattatgtctattgcgttttgacttttaagttaacacaagtcactatttatattatacctaatttcgacatattttttaagctttatttaaaatatattaattgaattttaacattgcttttatgatatttattttaccaagattacggatactttttaatgtaccctcttacaatttaaattccacttatacatatacctaaccttggcgaaaaagttcttgactattaagtgtatctatgatatattattacatgttgatgcgccgaagtggtggaattggcagacgcaacggactcaaaatccgtcggtagcaataccatgcgggttcgactcccgcctccggcaccaagaattttcaaggctttagagaataacctgattaagttcaggttattctctaatttgttttttggtcaacaattggtcaacatatactaaaatttattaatattaatataaaaaattaggattaaatagtattccatttttaatgtaggtggtataaaattgaaactcacatatatcttacagggttttttatttggtttagcatatgttgctccaataggaatgcaaaacgcatatgttattaatacagcgattcataaaagtagaagtgttactctaaaaacggctctaattactatcttttttgatattacattagcattagcttgtttttttggagttggattttttttacaaaaatctgtaattttaaaagatattatacttactttaggttctatttgtgttatatatataggattatcattaattaaatctgttcctgatgaattgcaggaaacaaaaataaatgaatctattttaaaaatatcattacaatgcctaattgtaacatggtttaatcctcaagctataattgatggaactttactacttggaggaatacgatcaacattagtagataatatttcaaacttttttatattaggaactgctatagcatctattacatggtttttatcgctttcaacaattgtttctattaacaaaaatagatttaataaaaaggttttaagaattataaatttaatctgtggttttattatattattatatggagtgaatttagcatatagcttaattattcatttcctttaaaatataatacactaaatatacagttcaacacacaaaatacaatgtgtgttgaactgtatattttatgtaaaattataaataataaaaagcatatagacaaatagacttatattccctgtccaaaaatcgaatagtatagaaagggctgttacaaaactaaaaaaatagttttgtaacagccccattacttatatattaattattttacgacgctcttaattaaagtaagtttattagtaaactccgtattatgttaattctgtattattagcccggcatcttttagaattcctttgtgatctttaattattgtatccactttaacacccttcttttttaaagcagtacctcgcccatatatgccatcaaactgtatgcccatattgtattgaataatacgagtagatatcctatttacatacggtctatcacataaaggtttattatatatttgctgaattgatttatactttgctaaccctaaaacataggcttatcttaaatagacaaagcgtaataaaataagccaataattaaaaaagctttggtgccattaccaagttttttcttatattatttaataaatttttttaataaaaccactgtaaatccttttattaataccctcttaactagtctgctgaattttaaaacttacaacaaaataatacgaataatacctacgtaaatagaacacaatagatagtaagctaaaggttaggaggtgtaatatactatggctaataatctatggaaagatcaagttggtcagcagcttcaagtagcaaatcaacaaattactctttgccaaagagagattcagcatgacatggactcacctaaagaacaattatttttacaaaacgctttaggtgcagtatcaaaagcatggcaaataattgaatctaacgactaacatttattatattcaattatttgtaaatattattctaaaacactccggcttttagtacctagagtgttttagttttatttaataaagctgtattcttatcctctctacactaaacaatttcataaattccaatttactttaaagaactatatttcatctagatccttattagtaggactttctatccattttcccttataatcatatcttgaaccatgacaaggacattcccaaattaattcatcagcattccacttaagctcacatcctaaatgggcacactttgttgatactgcatacacctttccatccttatccttataaactccagctttttcaccgttatattctacaattcctccatggccgttttgaatatcttttagtttttcttccggaatatctatcctttgtgctatgaaatttttcgctgttaccaccatatcatttgctgcatttttcatagctgctgttatattaagtcttttaggtgaaaatatctttgaaaagtcattttcctttccaagaatcatatcgcttattatcatggctgccaccatagaacttgtcattccccattttttgaatcctgtctcaacataaatatcagacgttttagaagaatagtaacctatgtatggtatattgtctaaaggtatacaatcttgcgcagaccaatgatatctttctattgaatttggataaaattgcttagctgcctttcttaattcctcataagctccaccttgttcattttcaccagttctacgtgctgcacctcctaatattaataaatccttataatttcttaaagagtatccgtttttatcaattcccttatacataccatttacattttgtgcattttccaaagctataacataggatctttcttgatgcattctcataaaataataacctggcgtatttaaaaatggataatgagttgccattactattttatttgcttttatttttatattattttttgtaactacagtattatcttcagtaatatcaagtgctgttgtattttcataaatggttaacttttctgaaatagcttttaagaacttaagaggattaaactgtgcctgattattaaattttaaagcctttttaacatttacaggaagatttacttcatctattaactctgctgcaattcctactttttttgctgcattatattcatcttcaagtccttgaacgttatcaaaggaatacaaatatgcatccttcttttcatagtcacaatcaattccttcttcatcaattacctctttatatttttttattgcaagttcattagccttagcgtactgctttgcagcttcttcaccaaactctttaattaatttatcataaattaaatcatgttggctggttattttagctgttgtattcttagtaactccagaagctatagctttagcatcaattacaacaacctctctaccacttttattaagcatatatgctgttaatattccagccattccggctccaataacaagaatatcacaattgatatttttatctaaggcctctctttttttaaacttaatttccgaactccatacactttccatacaatcacctcatgtatagtattccacttttttatctaccatacacaaatttgtattaattattaaccatattccgaatagcattttattattccttgcaatacttatcaaaccaatttgatgagctatccattagtttaagtaggaaaaaaattagcttcactatttttgaattaaaaatagtgaagctatataaattatgtaattatactatattttttactcttattttattataaaaaattaaggcaatactatatctataaaatcaccaattgaatttttatatgcgtcttttgcatttaccataatcctgtgatttccagatttcagattgttaaatatgatttcataggaggttgtatcactctcaacatcgcatccccatgaatatatatctttatcatcagtattgttgttaacatcataatcgcataaatattttccatcaacatatatactcaaaggtcctaaattattagttttattcaccaaaatacaaggatacttagtagttaaactaataggatcaaactcgttttgttgataattattaactctaccatagtctccatataaggatttatatgcagaattgacacctagtattttcatattacaaacttctgcaaatgcagctttacttggtataagtcctaccaccacaaataatgtaaaaatagcaaatgtaataattttttttctcataatattattcctccatttattatttataataatattttaccataaaatacattataatgaaaaagcattttatgcatatacactaatttcaacattctgtttttatagtatttaatgatagtaattttctttttctgctattttttaataagaatagtacgtaatattaatacgaataatattagtacaataaatattatttgtgaggtgttaatatgaatgataaatctaaagttataaaggtaaagaaaaattccgagggtgatataaccgatgtaatgcttgaaaatggaaatgtgtattcaatagatgaggcaataacaatggcaaaagatcatttaatagatggtgtaaacgttgctaaggcacgaagtggaagggaatatttaagaagcaatcccaatggagatgaaggagataatttagataataaaccaactttttaaagctttgtaacttgctacttttaaagccactaaaaatatgttttactagtaatcaattttgataaagtatacggtagattattaattatgcatgaagaactacttactaaataaaaaattcaatatattaagaatacctgttcttaaaggcattcttaatatatattttttaaaacttatcataaaaaataattttacatacaaaaatttgatacattctctttaggtttttatgcattatttctatctaataagtaaacctctctataattgatattatcaattcattaatttgattagttttatacggtgaaattgcatttaatatagctggtgacataggtatcaatgtattaacgaaatgataaaccatatctcttttttttgacattagaatagtacttctggtgtaaaactcatataacttttgcaggttatcatactgagttggtttataaataaagtaaatcttcacaaaatacccccaaaatttcatgctagatataatacttcattaatactaaaatattatccttagatcatattatgaatgattcctgtaaaaatacggtaatagttttactgtataatatcaatgcttattactatactatttgtaatcaagttttctaactccaagagcattatttttccaaagaatatctttaaccatttctaccttactatcatcacattctataataaggacaacttctgatctttcactacacttttgttcatctctgtattttcgggttacaattagcttaattacaaatcctacacatgagcatgatactataccaattagtccccataatattggtccccacttcaaaacaaatccatatatacttccaaatattccacctataaccgcaagtatagacggtaaatcaaataagctcaaaccgtctgaactttgaatactatcaaatagcattctttcctctccttttttatccataggtatagacattattctctctttcttaatacctttcatttcaattgccgtaatagctaattctaaatacaccgaatgttcaaaagtagaaataacgtacatcttatcccctcttatattatctttcaatggcattacaaagtttggatcttggtactcactttctaaaaatttggcttgttcccaatcatatagtttattattttcaactgtattcacataagcatcatatattgaaaaaaaatatattgatggtatatttaaaaaccactgaatatttaataccatttttgcttttccaaagttacctagtaatgtatagtagacagataccataaatttagactcataacatacaaaaatccatgctgatacaacgaagacagctgtaataagtctatgaatataaagctgaccagaacctggcgttaatattgaccataccactgaaacccatgggtttctcttatctaaataatttatttctaatgtatcgattttaaatgatttaatatctttagcttcccttgctgctaatatatatgaatgatttatatctatagttgttctgtaactatcccatattgaaaaaatgtatgttggaatataaaaaaatacccatcttatatctgcaatttgctttactttattaaaatctcctataaatgaataaaatattagaagatttatatgtgatttgtaatttataagtagctcccaaccaaatagtaaaaatcctcgtaaatactttgatagtaataaatgccccattcctggaaatgctactgaccaagcagcaatcacaaaaggatttcttaaatgcagctgtgttgttcctaatacgctgaggtatgcaactgttcttcttgcataagacttaccattcttcaaaccattcatgtctaactccttttaaaatacgttcctatatattattaacatattttttataactaaaccttatttttaaccatacaaaaatattgatttaaagtaaattgattattaaatattgtagtaatattcttactatggtgatataataataccgatttatttattaggaggggttgggtaaatataatgaaagtaaacattgataataaaataaagcttcatggtttcaataatttaactaaaacattatcatttaatatgtatgatatatgttatgcaaaatcagcagaagatagagaagcctacatctcttatatagatgagcaatataatgcggatcgtcttacagaaattctcacaaacgtcactgaaattataggtgccaatattttaaatattgcaaaacaagactatgaccctcaaggtgctagtgttactattcttgtatgcgaaaatcccatagaagaagaacgtaaggaagccttggtaaaagaaactcctggtcctcttcctgaaatcgtacttgcccatttagataaaagtcatattacagtgcacacctaccctgaatatcatcctgatgaaggtatttgcactttcagggctgatatagacgtatcaacctgtggaatgatatctcctttaagagctttaaattatttagttcactctttcgaagctgatattatgactatggactatagggtacgtggttttactagagatattactggtcgtaaattatttattgatcataaaatcaactccattcaaaactacataccaagtaatataaaaaccaaatataatatgattgatgtaaatgtttaccaagaaaatatttttcatacaaaatgtaggctaaagcaattcgacctagataactacctatttggatatactaaaaaagatttgtatccaaaagaaagaaagaaaataactcataagctaaaaaaagaaatggatgaaatattctatggaaaaaactttgatgaagtatattataaataaatgcaacggaggaatattatgttagatctttggtattcagaaagtcatgcagatgacacaaaattttcaataagagtaaaggaacatttatacagtgaaaaaacaccttttcagcaaatagatttttttaaaagtgaaacttttggaaccttttttacacttgatggctacataatgatgactgaaaaagatgaatttatatatcatgaaatgattactcacgttccaatggctgttaatcctaagataaaaaaagttttaatagttggtggcggtgatggaggaacttcaagagaaattttaagatacaacactatagaaaaagtagatatggttgaaatcgatgaaagagttgtacgactttgtcaaaaatatttaacccaaacttcctgcaaacttgataatgactctagacttactatgcattttgaggatggtaaggaatttgttaaaagagctgaaactggtttttacgacttgattcttgtagattcaacagatcctattggccctggcgaaggtctatttactaatgaattctatagagactgcgaaagaattcttagtgatgatggaattttaataaatcagcatgaaagcccatattataaggattactgccatgaaatgaagagagctcacagtaaaataaaagataaatttcctatttcaatggtttatcaatttcatatgccaacttatgcctctgggcactggctgtttggctttgcatccaaaaaatatcatcctttaaataatttaaacgctgatagttggaatagtcttggacttaaaacaaagtactataatacaaacttacataaaggtgcatttgcacttccaaactacgttattgatgagttagaaaaaactgagtaaagaaaaagcttatccattagtatatattttaatggataagcttttcttatatactatttatgtttaggatataataatggcacccctcttactgtaaaactgtctaccaataagtgtgataaataaaacccctcatatatttttttgcctttacaaggcttaaatacttatacttaagtttattttttattgtttatttctttcaacgaacttgcaatataaatttgctaattatataaattaaatcaccaaagaatttctttcatctaagcgtaaccaacttcaccaaatacataattaggcttggaggtctatcatccccataaaagtagcaggaaagtacatcatcaagccaaattattaatattggaagcacataccaccatatgcaattcttaagctctatttgtcccataaaattaaatctgtctttactataatcccaaagatgtaaacctaaatataaattaaagaatatacctgaaaataattctactaaagttatagtagttccaccaattaagacttgcttccacatttttaaattataataccctggcctatcatttagccctcctataataacgccgcataaaccaccaaccaaaaacatccacagacttgtaaatcccataagtgaaagtggtttaatcccctcatatcctactaattgttggccatgagctcttgcaagaacttccacatccatataaatgcctccaaatattaaaaagtgaattattttgttttttaaatatttcattttagatctcctttaatcttgtaatattctatgcttccaattaaaatacctaaagtaaacactctcttatatcatatattttccgaactaactatattcaccctttgatgcattatttcatgtactaagcataatacatattaattaattgaagatttggatttgctcccttaaattacttccttacatttttattactttactaaaataactactattcccattcttcttttatgtaataaaaaaagagctcttttaatacaagctcttttccataattttttagttttcaaacttttgacaatacctattgtagcagttttaaataatgcagatgtagtagaaaacttagctatttattatattttaaactcaacataaaaagaaccgactcaaattaagtacggttctttttatgtttacatattaaactattttctcaatccactttcaatcttctatgtttttaattatatatatctatatggcaattcaatgaatagattcaccgaacagttatattatatactcattatatcattttgtcaaatctcgtcgaaatttgacaaaatgatataatgaaatataatatatttagaataccttttggaggagaaccacaccatatgaacccacttactaaccgtaaattacaagcacaaaataccaaaaacaaaatttataaagcttccattgaactgtttgaaaaaaaaggatatgaaaacttaaaaattaaagatatatgtaaagaagcaggtgtatccataggttccttttataatcattttgactctaaacacgccatacttattgaagtccacaaaaaagctgatgaatattttaaaaccgaagttaaagataacattattagcactaacggaattgataaaattatagaattttttgattactattcaatatataatgattttgttggtcttgacaccttaaaacaattataccactcaggaaactattttttttcacaaaacggaagatacttacaagtactactacaaaaaattatacttgaaggacaggataaaaaagaaataatctcaactatgacaacagaagaaatttgtaatcatctttttatttctgctagaggtgtatgctatgattggtgcattaatgatggtagttatgacctagtagactttatgcacaaacatatttcattaattgctgaaagctttaaaataaattaattccaacatttgttataaaaagaagtaggattaataagatactcctacttcttttacgttaacgttcacgataacgtgtgcaaaactttctattttcctaatacactttcaacaaattcctttattttattacatttacagttagcatagaagtattctttaaatttttctccgcttatagctccttttaccagctcttgatctattcccttcaatattgttacaagatccttaaaagctacttttctgacctcatctaatatctttttgtttctctgttctggaaccactctttcttttggatatccttgtccgctttctccttggaacagtttctcaaaaatatattctaaatttaattctgctccccatccgaaacctttagcaaatggaatagcaattgcatttccatcattaatttgtgaaaacataaatgcatctgaaggatctactacgtgtccacatattactcctggaaaagaatttaaagcaagcattgctccctctcctgtgccacatcctgttattacatagtcagctgctcctgaatttaaaaggatagctgctaaaataccattttggacgtaagttaattgtatcttatcttctgctgtatacattccataattaaatacttgatgtccttttggttctactactttctttaaagtatcaaatataagctgattttttccagcttggctattttcgttaattaaagctattttcatttccatcttctcctatattatatttttattattgcggttgttttccaatgtaagctaaaattccaccatctacatataaaacatgtccatttacaaagtttgaggcatcagatgctaagaatacagctggtcccatcaaatcctctggtgttccccaacgtgctgctggagtttttgcaattataaattgatcaaacggatgttttgaaccatctgcttgaagttccctaagtggcgcagtttgtggtgtagctatatatccaggtcctattccgttacattggatattatgttcaccatattcagatgcgatgtttcttgttagcatcttaagtccacctttagcagctgcatatgcagaaacagtttctcttccaagttcactcatcattgaacatatatttattatttttccgtgtccttttttaatcattccaggtattacagctttagatactataaatggtgcatttaaatcaacatctataacctttctaaaatcttctgctttcatttcaagcattggaatacgtttgattattcctgcattatttacaagaatatctattaatccaacttctttttctacttttttaacaaatccatttaccttatcttcgtctgtaacatcacatacatagccatgtgcttttattccttctgcctcgtatgcctttagtcctttatcaactaaatcttggttaatatcattgaatactattgttgctcctgcatttgcataggatcttgcaatagcaaatccaataccatatgatgcaccggttactaatgcaattttaccttccaatgaaaaatccttaagtatattcatgaaattcctcctccttgaatgataatatttttacacattacaattatactattatattttagctgtttcttgttatattttttttaaaatgttgcaaatcttgaagtaataactataataaaattagaagtatattaatttcaaggtaaagttttatttgaaataaggtgataatatgaaactatttacctcctgtaaggaatctgttaaaaattctatagatacgaaatacttctcaatagcacatttgcatagtgaagaagaaacaatgtctattcatatacatgattgttacgaaatttactattcaatctctggagaaaatcaatttttaatagataataagctatattatatcaatcctggaaatttatttgctgtaaatgaatttgaaagtcactatgtatcccaagtaaataattcaactcatgagagaatagttatttcgatacatcccgacttcttaaaatccttatgcacctctaaaacaaatttaacctactgctttaaacacagaggaagtaacttctgccataaagtttcattaaacaaagagcagcaaagccgattcatgtactttataaacaaaattataggaagccatggttttggtgctgacatgattgaatatgcaagttttatagaattaatgatatttttaaccagcttattcataaacaatggggaatctcttactcctatttataaatatagcaaccaaattgaggaaataattagatatataaatgacaatgttacaaatgacattactgtaaaacatctagctgagcactttttcttaagtgaatcatatatttgtagaatttttaagttatcaaccggaactactataaataagtatatcactgctagaagaatatcaatggcaaaagctcttttatcaaatggatcaagtattaatgatgtctatgttaagtgcggctttaatgactatagtaattttttaaaatcctttaagaaagctgttggaatatctccaaaaaaatactctacttttagtacatcttaaaacaaaagaagtcttacaaagaccaacggtttccgttttgaggtgcagaacaaaaatatctcataaataataacataaaaacagcattaatattcacgcatattaatgctgtttttattcgctatttaagcggaaggcggagtaaaatttattcgctatttaagcggaaggcggagtaaaatttatttactatctactatattttagtggaagcaactccgaaattttacacttaacaactttgtttttataaggaattataacattaacatcttgacagtaatcgcttattagttctcggcacattccacatggtgttacaactttaattattttatctaattcatctggagcaggatgtctaacggctacaatagtttcaaattcctttataccttctgatattgcttttcctattgcaatcgcttcagcacatactgtaactctcccaatgtatgcttcgatatgcacagcagttattatttttccttctttagttctaattgcacacccaatatggtgtttatcagtttcatataaatcattgataatattttctgcttcaacaattaactccgtatctttttcatcaatttcaaatatattcattagttttcctccaatcaaaataagtttatcatgaattgcaattatttactattattatctatgaaatactaatgcaataccaatattcggaatagatatacctttttcactactaaggaccagatacaatagatctttcaagaatagggactctccttcatatctgattaaaatatggacataaaaatcacttgtgatttttatggtaaatcacaagtgacttatgatgttaattattaaatttgcacctcaaaacggaagccgtttggcaaagaccagatctcttttattactcaaaaggattttctgttttatatagcatttcctttggcctattaaaacctacctctttaactcccaaatatctaaacaaattataaattgctttaccaaaatgtccaaatgcaactgcaccatggtgtgggaatctattttcaattagtacatggcggtaaaatctccccatttgaggaattgcaaatactccaatagatccaaaagagcgtgtcttaacaggtaaaacctctccttctgctacataggctgttaactcactatctgcattactttgtagacggaagaaagtgatttctcctggtacaatatctccctctaacgttcctctagttatattaggctcttgatttggctcaagagctcttgccataatcatttgatttttcatagttccgcttgttaatttacatgctgctgtgtttccacagtgaaaacccatgaaggtatcctttaacgtatagttaaatttgcttttaatttctgattcatacatatcttttggtactgtgttattaatatcaagtaaggttacaacatcttgacttacacatgttccaatgtattcacttaaagctccataaatgtcaacctcacaagatactggaattcctctagccgttagtctactgtttacatagcaaggcacacatccaaattgtgtttgaaacgctggccagcatttatttgcaaacacaacatattctcttgatcctttatgctcctctgcccaatctagtaatgtaagttcatattgagcaagctttggcaaaataccaggcattttattgccctcacctaactcttcctccatgtcttttactacatctggaattctagaatcgttttcatgttcattaaatgaggcaaacaaatcaagctccgaattttcctctatttcaacacctaaattatataactgcttaataggagcattgcaagctaggaaatcctgaggtcttggcccaaaagaaataatctttaaattctttaatccaattaatgcagtagcaaccggtacaaattcattaatcatatttgcaacatctgaagctgttcccactggatattcaggaatataagcatttatgtttctaagtgctaaattatagcttgcatttagcattccacaataagcatctccacgtccattaactagattgtctcctctctcttctgctgcggctgcaaacataactggtccatcaaattctttagcaattaaagtttctggagtttctggtccaaagttacctaaatatactactagtgcatttacacctgcacttttcacttcttttaaagcttttctcatatctttttcattttcaacagttgttaagcactcgaagatttctccattgtaagcatctactactgcctttcttctattctctgataattccattggaaagcagtctctacttactgcaacaattcctaattttaattttggtgtattattcattttaattcctccattttattttattgaaatatttttacctattaatcctataaatgctccttctttatctaggttagtatccttatgggcaattaaccatttgtttttagcaaaaagtagagcatcttcaccagtttttttatactctttttctaaaggcaaatttgtatctcttggcaaaaccacaacacatctgaatcccccttcatttacattgcaaggtgcatagtgaagagtagttgcataaacctcaatagcagtaccagctggaactttaaatgctttaattttagaagtactatatgagtaatcttcttcaatatcatctctagagcctaaaagtagtatgaaatctgttactgctatatttatttcagatgaacgatgatattcgactgcatttaataaataattgttaccattgcagtatcctacttgtattggaagctctccatattctctttcctttaattcctttgcaatatcaagctcttcaagttctttaattgatggttcatatactacatcacctggaagtggtgtagatttcattttttctattatctctgtacaatcataatctcttaatatcttgccatattttttgaactccttgtctgtaacacttttaattaccatattctcacactccccatataatttaaattggttttatttaaaaaatatcttaccaatatgatttaaacttctctaataaatatatgtttttaaagtttgtttaataagttttttagataatctactctttaaataaaagcgctcctacttttaactatttatatatcttttattttaggataagctgaattatatacctcatatacctttgaatatacttctattaaatttgcatttggcataaccttttcgtttccttttactattttgtcacaagcctcttccacggaattatatattcctgcaccaactcctgcaagtattgctacgccaagtgctggtccttctgatgcctttactgttgtaagctcatagttaaatatatctgacaatatttgtctccatatgctgctttctgcacctccaccacttactcgtatttcctcaatattaaccttcatattctcaataatatcgagacaattctttaaactaaagcctactccttctaatatactacgcacaaaatcattgtggttatttataagtgatatacctaaaaaagctccttttacatttggatctatgtgcggtgttctttcacccataaggtatggcaaataaattatcccattagaaccaggctttgattgtgatgctttttcggtcaataaatcataaatattaattccagcctctttactttctaaaatttcttttgcacaaaatgtccttttaaaccaatttaatgataagcctgctccctgagtaactcccattatatgccacttattaggcactgcatgacaaagagtatgaactcttcccttactatcaaatctaggcgtatctgtagccgcaaatactactccagaagttcctatcactgttgatattaaaccttctctaacgattccattccctatagctccagctgcttgatctcctgccccacctacaacgggagtgttaactgctaacttagtctcttttgaagctttttctataacgcatccactaacaacaactgattcatatacatcaggtaatatgttcttatctattcttaagtcatctaaaagttcttcactccaatttctagtatttatatctaacatctgagtaccactagcatctgaaacttcggcagcaaaaactccagtaagtttaaatcttatataatccttaggaagaagaaccttatatattctcttataattgtctggttcattattcctaacccataatagttttgaaagggtgaaacccgttaatgcaggattgcctgttatcctaattaatttttcttttcctatggtatctgtaatctgagtacattccttttctgttctctgatcacaccaaattatggagtttctaattactttgtactctttgtcaatcaaaacaagtccatgcatttgtccacttataccaattcctttaatatctaaaggatcaattttacttttttcaattacttctcttatacctttaacacaagctgtccaccaattttcaggattttgttctgcccatccaacctgtggttgaaataactcatactcatgcgttgaagtttttattgtatttccacattcatcaaacaaagctgtcttggttcctgatgttccaacgtctatacctaataaatacctcacaatcaaacccccttaattttaaataactttttaaatatcctttaataagtctattttactttttttacctcctacagtcaatatgtttttgtaaactttttcattttatttatataatggcttatatggcactgcatttcacataaaaattgtaataaaaaaaactgcccttaaattttcgagcagtcttttttattcacattctacacataaaatatataattattatatctctaatactaattttactccgccgtaaattcctgcatcatttccaagccttgcaagctcaaacttagttccttcacatgcatgaaatgccttttcaatgaaatttttctgaattacatttataagaatcattccagcctttgatactcctccacctacaacaaaaacctctgggtcactaacacatgaaactgtggctaatgcattacctaatttttttcctaaagcttcaacaagttcattagctaatttatctccttcttttgcagcatcaaatatatcctttgaagtaaccgttttaatttctctcaaagaggaaggttcactactattatttaaaagtttttttgcttctcttacaattccatttgctgaggcatactgttcaagacagcctgtctttccacatccacaaacatctttctcattttcctctactttaatatggcctatttctccacctgcaccatttgctccagaaattatattgccgttaattataattcctccgccaacgcctgttccaagtgtaaccataacaacatttttatagccttttcctcctccctgccacatttcgcccaaagctgctatattagcatcattaccagcctttactggaatatctatcatttcacttaaagtttcttctacattaaatatgccccatcctaagttcacacattttaaaacggttccatcgctgctaactggtcctggtactccaactcctacaccaattacatcatttctatgtattcctttttccttcatcttatcttttatttcttttgatatatcacttaatatatactttccactttcctcttttctagtaggaatctcccacttatcaagtaaagtgccatcaactctgaatagacccatttttattgttgttcccccaatgtctattccaaatccatatgttctcatttaacatcctccttatataataatgatatagcattaaagcttatcttttatagtcatttgttttaaagtagacctacttataatatgcatagcactacattttaattatataatcagcactatatataacaaattagatggattttgcacaaaagtttaagtttagcatattttctaatagataaatccttttcatatcttaactaattctccttattttacactattatgtatcttattgaagaatagcttggatatttttcccacgattttctaaaaagtatgttaaacttctaacaatagtatacatatcataaaactctttagcaactaaatttataattttcttattaagtaacatcattttacttttgtattcctcttattttctcttttttttctttatatattatatcatttattgagtttattttaaccttatcaataacaactaaatacagttaatttgtttatttttatttacaaattacttcttttatatctacgcaggataaatctttaaatttataattagcttttatattatttgaagcatatccaacagctaaaaccttcattccgccagcaattgctgcctcaactccagcatccgcatcttcaactattaagcactcttctggacttacctttaatttctttgccgcaagtaaaaacacttctggattcggtttacttttttttatctctctgccatctgcaactgcatcaaaatatttatctaattttatcttttctaaaataattgacgtgtttttactagaagatccaattgctatttttatattctttgctcttaaggtttctaatacgttcataactccttttaatatgtgctttggagtcaactcatttaataactctctgtatataaaatttttcctttccgtcatttgaattttttcttttgtattgtatgtttttttagctttttctaaaattatttctaaactttccattctaccaacccctcgaagtctttcatttattcttttgtcaaaatatattccttcctcatcagccatagccttccatgctctgtaatgatactcatctgttgaaactataactccatctaaatcaaaaataacagctttaatacccacttatttcctccatttaatctattattttaaagaagctttcctaataaacattttcttttctttataactttcttctaagttactatattcataaagtacattaaatggtataaaaagtgaaacactacacaaaataaatttggaggtgttttactttgaatacaacattaagtcaaaaagaaagaactctattggaggacgctaaaagtcatgagcaagtctgtatacaaaaatacagcaattatgcaaaccaagccaaagacccacaattgaaacaaatatgcaaagcaaacgaacaatctgaaaggacacatcttgatagtataaatcagcttttaagtggtacaattcctaacatgaatgcacaaaattctaataaaaacatgacccctagcccaactaatcaaagtccacaacttagcttttcagataaggatttatgctcagacttacttatgaccgaaaaatatgtttctagtacctataacactgcaatatttgaatttagggataccaatgttcgtgatatattaaatcatatccaaaaggaagagcaaaaacacggtgaagccatatttaaatatatggaaagtaaaggtttatataacgtacagtaattaaaataatggcatagaaggctgtaaagttttccatgccattattttaattttcattttgaattattttttataattaaacatataattaattattagatagtgtgcaaggtgggggtatcatgtcaaagaatgaattttttacatttacagaatatatgaaaaaagatgaaaatcttctatccccttcaggagaagattacatggagatgatatatagactttccatgaaaactggctttacaagggttaataacttggcttcagcattaaacgtacaacctccttccgttacaaaaatgctgcataagctggctaatttaaaattaataaaatacgaaaaatatggagtaattatgctagagaaagctggaacagaattaggaaaatcattattaaaccgacataatataattgaacagtttctcaaattattaagtataaatgatggtgttttggaagaaactgaaaaaatagaacataccattaatgctgaaattttatgtggaatgaatgatttagttgatttttttgcagcatatcctgatttttttaaaaaattcaatgagtttaggaaaccaaagtcttatccttaaagcataaaacaaaggactagaaattattttttaatctctagtcctttatttttatagcttaaattttttaacctcattcatcatttctcttgttctatcattaagattagctgctgattttgcaactgtacttgatgatgtattcatttcctgtgaagaagctgatatttcctctgatgcagcagatgtttcctctgaaatagctgctgtagcctcaaccttattacttattatatctttattattatttaaatccactactgccctgtttatctgattaattttaggaataacctcatttatagatgttactatacctgtaaatgattctaacgcattatccacaacagatatttgattttccaaatcatttcctaccttagatgtagtagttaccatgcttttattctcattatacacttcacctactaaacctgatattttttcagcagattgtcccgcttgttccgcaagctttcttatctcatcagaaacaactgaaaatcccttacctgcttcgcctgctcttgctgcttcaatggctgcattaagtgctaataaattagtctgctcagctattgaattaataaaatctgttatttcgtttatattttttatatgttcacttgattgtacaattttcacttcaaaatctttaaatgtatttgttacttcttttatagaagttgcaagtttattcatctttatccaactatcttttgccaaatctataatattttttgaatttacatcaacatcatttacttcagctgtaatctcatcaagactgcttacaaattcatttatagtctcagttatatctgacatttcttctgcttgtgatgttgctccttttgtcacctctcctaccgcaagtgtaactgcttctgctgaagaattcatctcctctgctatagaagataggctctctgaatcttcactaattttatttgaattctctactacagcccttaacataccttttattgatttttgcatattatctatagcttgaaccattactcctatttcatccttcataccaatatgctcttttgatacttctaccgtaaaatcaccatttgatattggaactatatagtctgttgcaacttttattcgttttgctaaattgtttgctacaagatatacaattaagaatgctaatgctaaaaatagaacagctaatccagctgtatacttttgtaattttgataactgattatccatctcactttgctcaactatgactgctaacgaccacgttgtatttttaattggcgcaaaagctgcaaattttttatttccaccataggtataataccccgaaccagtttttccttgagccatatttctttcaatactaacaagttcctctaatgacggattcttttttacattcacaaaatcattatcctgcttagctactaatgttttattataattagctattttaacccctgtattgtctatagcaaatactcttcctgtactaccaaatttaacttcatctgctattgaacttatgatattaccatcatttatagctactaatattccagtaatattaccattttgccttataggtgctgcaaaacatacttctaagtttttttctattttccctataatgggatttgaaacagctatttctcctgataaagcctttttaaaatattctctattcgcaatattggttgacgttaaattattatatttaacattcccgtttaaatctgcaattccaattttaataaatttatatctcttattctcatcgttaagaactgcgagcttttcatctaatgacttatcactattatttattacactgttaaaggttatttgttcaaccatattctttttatcatcaacttttgctgaaatatagcttgccgccgattttgcaatttgaggcattatactttcattgttatttctaagtgcatttgatgaaagcatgcctgccaatattcccataccaactataactacaataatcaaagtttcaatcattaatagtattttaccttttatactcttcattatttacctcctgctttcacatccaagtgtatacaccgaattttctaatattgtattttcgatcattttcttcatttttcgtatatttgtgacatcacgtactttttttatcgtttattcttaagaataccttacatgtaattttataataacatatttatatttttcaaacctttataatataaaagtataatataactatttcaatttcttttcagttttataatctactatcccattagtaaaagttatgttcatactagatccatcagaatttacccattgatacatcttactattactccccatcaaatttgtttcagataataactctccttttccaactaagttctttaccttttcataactcatacctctacttatttttttatatttgactctgctaatgtttgcattaattttttctaaaccaatttcaatcttgctaaccacataattatttttagtaatgactactatatagctgtcatcgctatttttccattgatgattcatcaattcccttttatcattaatttgtcctgtcttttcacttacccctaatatattttctacacttttatagttcattcccatatttattcttaaaaacttcttcatactatattttttatccttcacagaattcttcatgtggtggcttaaagcctttcccttagcagcataagcagcagcgttttctttattcaatttaataactccaacacttactaaagcaaaaaacatagtaattgaaaatattattttcatcttacttttcattttaaacacccccattttatagggtattaaataataatggatatcattcctctgtttttatcaaataaattaaaaggatttctaaaatgatttaacttcatcctagaaatccttttaatttatttattatttctttcgtataatatcggctgtatctttccatatatgtcacttgctatagcattcattcccttgtcgttaggattaaactcatcacttacaccataataagttttttctcccgaaggacctatattggttttatccgaccatattggttttaaattaactacaggtatatttcttttttgccctacactatttattacctgatcataattttctccataattaacattccaagttgtcattaaaactataattggattacgttttacctttattgtaacatcatctataaaattattaagctgattctcaaaagcaactgctgatatgttatttgcactatttgaatcattggtaccatattctatagttataacatcaggcgcagcactatttatttcattaacattattaattgcctctgaaataagtgaaccacgctttcccatattatttttttcaacctgaaatcccatattgtttgtaattaaggagcttaacttattaacaaaaaagttatcttgagatgttgccgaatatccagctgtaacactatcaccaacagctatatatttaagaacttttcccttgccaacgtcctttgtattcttaggtgtatcctgcttttcttgtgtctttttgtcttttggttgacctagctcttttttttgatacgcctcaacaactttttcattatccttgtctctttttttatcatgtattatcccgctaattattactgtaatagtaataattaaaagcacaagtaccgtaaccgtcattttcttatcagatttgtatccattacccattatattgcttcctccgctaatattaataaattcacaaataaatgatatcttatttgcagataattttcaacatgaaatgtataatttagtatttcatagagatcaaaggttaaatttaagtgcagttaaatactcataatattttttctttcaagtttattacttattctgccagtttttttaaatgcaaaattaaatacaaataaaaaaaggaggaaacataggcaaaattatattaaaaaagtatttagaattatattttcattacgataacatatacataactgttatttattactaataatatttattattacctaaggggtgagagattatatgtcaaaacaaaaaaaattattgccaatctatgagttacagcctggcatgatatctgcaaataatataaaatttgcagaaaagtcgcttttaacagagggtgttgagataacagatacagctataaggaaattaaaagaaacttatataatagataaagtagaagtgtatattgatgaagataaacctttgaaatacaaggctgaaaccatggatgaacttgaatattcgctaaatgaattttcatctaatttagaggatatatttaatgatatcgataatttaaagagtaatggtattagtagtttaagaaacttttctcaaaaagtacaaggtgaatttgaatcagctggtctagtaatcaaaaatataattttttatggaagtaaaaataacatctacagacacagtgttaatgttgctgctataagttttatacttggaaaatggcttggtatgaatgaagaagaaataaacttattaacttatgcttctcttcttcacgattttggtaaaacccaattagacaacagtatattaaaaaaagaaagttcattaacgccagaagaatatgcagtatacaaaacacatcctgttatagcttatcacctgataaaagaaattcctgatattaatgcttcagttggactaggagtactaatgcaccatgaacaaattgatggttctggttatcctctaggaattaaagacaataaaattcataaatttgcaaaaattatagctatagcagatatttttgataaagttaattcagacaatacaaatggtccttttgaaggtttaaaagcaattaaagatctaagtctcggtaaattagattgctcgtatagcaatatgttcataaatcatgcagtaaattactatatgggagaaagtgtaactttaagcgacaatagatcttgcaaaattataaaacttgatactgaaaatctgacaaaacctcttcttcttgcggatgacggctttttagatttaaaaagtgaaaaagacttatatgttaaatctttaatagtatagataaaaagcagctcaaattttcgagctgcttaaaaatatacttccttactttgttgcacacaagatatatttaagaattttcatttaatagcttattccatgtgtcatttccaacaattccatctgcatttaaaccatgatttgattgccatacctttacattagcctcagtttgaggtccatacactccatctaatttgccgcctactctgtattgaatatatcttgtggcatactcataatgcttgaatttaacaccatctgttggcttagaataaatttctgtaactgctgcaaccgttttcggtccccaaattccatcctgtgctaaccccatagctccttggaattctttaatagcagctgtggtacttgctccacttatcccatctactataagacctttcttaagaagtgtattaagctgctgctgtataattttaactgtatctgatcctgttattataaattcacctctgctgtctgaatttataaaaataccatcattaaattcattcaaatctacagcaccagacactccgcttatagaaccattttcagtgtattgaaatccaacatatggagtatttatactaggccttgtaacaccatattcagctacccataaaggtaaatccttaacactattatttaaattatttttatagaagttagtataagtgtaaatacaaacatccagtccttttccctttaaataatctgcaaattttcttacatttgagcttatttgatttgtggtttgacctaaagtagcttcaacatcaatagccagcttgcaatcgtagcttaacccagaaatagcagataaaaaattatccgcttcatttataggattattagctcttaaaaaatgataaaatccaactttaagtcctgcatttttagcatcactttgaaactgcctaattgttttatctacatacgttacaccctcagtagcttttatataaacaatctctacaccactaagcttaactttggagaactcaacattgccttgtcccgaataaatatctatacccttcaaattcatccctcctatctcacaatatatcctttgttgcctacatttaattctattagtgtactgcacttatatcataggaattctaaatacttgaccgccttaatttaaattgtagtatcttaataaatttaacattttggaatatgcgtatcaaaatttaaacataaagaaatcctatagattatatatgcatctctataggatattggtacattttatttactatatctattctttctacttcccatcttatagtctccaggactacaactaaactttatggtactaccatcactaacacatattatagtgccattctcgtctgttctatacaaaggtatgtttctgttcttaagtttttctactgtgcttttatgtggatgaccgtaatcattatctcttccacagcttataactgcatatttaggacttacgtaatttaaaaaatcatctgtagatgaagttctgctcccatgatgagcaatttttaaaacatcgcatttgagatcatatcccttctcaatcatagcttcttcatttgaactttgagtatctcctgtaaacaaaaatttgttttgtccatatgtaacttttacaactatagagtatgtattgagattaccctcagttggattaaccggcccgtatacattacaatcagctttatttaatttaaaattttcactatcaggttcatcagcctttaatcctttttccttcatagcataaattagatccctaaatgttttagtattagtactaacactattcatgtatattttatcaactataaaattttttataaccttatctgctccgcctatatgatcttcatgcggatgcgttaaaaccatataatttatctctttaatattttgcttttttaaatagcttataagataattttgagattcattagtccctgtatctataagcatatttttatctccatcctgaacaagtatactatctccctgacctacatctatgtaatgaactttaaattgagaattggatattctcccacttatattagtatcctttccaaaggtactaatatcttttgaacatccactaattaatattaaaatacagactagagtaataacacactttaataatcttttcaatgaattcattaaatttcctccataattaaccagaaaacaatatttttatataattttaagaaaaaagtaaaatttaatatttactttttgataataaaaaagtataatagaattgcagttagaaatacattttaataaattacctttaaagagtaactttattcactttacattttattattttttatgggttgccattgagaaaatatttgtgagaggtactttttagtaattacctataatttttaactttatagtcaatttcccctcgattttttaacttttatacaaaagcactggattacaagcagcgcttttgtatatctttttaaataagtgctgccacaatattggaaattgcacttgcaaaattaaattcctcaaacttaaattcctttatcttcgttggtaccttaaaataaagtatacctttaattattcccttgttatttaggggaataaccattatagaatcccaatctggcatgcctgtagtctcatcaaatccacttatgttatcccaatcaatcatgtataaaccaacttttttctctaaaacttcttgaacaatcttatcattgatatatgtctttttaacaaactcagttttaaatatctttcttgtataaatgtgagaaatttgtttgtcatctaacaatattatactacaatatgctgcctcaaaaaattcgactaatctacctagtacattatatatcttttcctctacattgctgctacttctaagcagttccataaattcaactgtgacaagtacatttctagaatctttaacaggattaccagttactatccctgttattttatttgtaactttagctttatagttaaatcgttcattccatataacacatttatttcttcccgtattctttgctatataaagcgctttatctactttttcaaaaatttcttctctagaccttgccatatcaggatatgacaccaatccaacgcttattgttacacttctcttatttccaagtattttagctctatctattttctctcttataccatctgcaatttcatatgcctttaacacgttatagcttggtaatataactataaactcttctccaccatatctggcacaaatagattctccatctatattatttttaactattctactaacttcttttaataccgtatctcctgtgccgtgtccaaacttatcatttattgctttaaagttatcaagatcatacataaaaacagtgaattccttattggaatttctctctttctgaaacatttcgtcgatataaacatccagatatcttcttgtcattacaccagtaagtgaatcaatagtggcactgatttttagtgtgtatttatcaacatttaaactcaaaagaccattaagctctatacatttattaatagcatccacattaaaattatttaatattttatccgtctcaatatacagtataccagatagaattttattatcttgtttattgaaattggatagtagcttatatacaggcatgcatattactgcctttatatcatcctctagttttttttctggtttaaatccaaatctctttataaaaataagctttttcctggtattaacatcattaattacccagttttctttaagtatgttattatcaataaaatttctattttgagtaaatactactgtatcttcatcttgggcttgattaagaataaaataaatttttttagcaactaagctgtgctttaaatatctaagtatattttgtatattggttatagatgaatccacttgatttttcattacatctatcctgctacttacttccctaggaataaatgactgataatatttcttcaaatcctttttaaactttcttgtataaaacaacctttttaaatttgtaccttcataaaatttatctattccatcaccgttaagtatgacatcaacacttttggagaaaattatttcttgaccagcatattcatttacaatgcctatatattttattaaatcatctcttatactataacacatcgcaaaatctttcttatatttatctggaacactcaaaaaataacgccatataaaatctatatagtcaaaaaaatagtttatagccctaatgtaatttccattctttaagtaatactgtgcaatattagcatataagaatttaaacacctttatatccttttcattttctctaatagcattgatagagtacttaagcattttttcaccagatgcatttaatgctttgattactttcatagcacctttcattacatcatttttcatatgataactggataactttttatagatgatataaaatatctctaaatcctttttccaataaactattaccgccaattgtattattgtagttatgctattgacgcttttattattaatattcatctcatgtacagctttttgaaaattactaaccgacttctcatttttttcaatcaggtaatctataaagcattcaactacttcttccttttttttaatattctcagacccgtatttctctttaaatttttccatgtattccttagactttttaggtaaaccaatctttaaatacgtttctatagctgctatataatacatattcataatatccaaatcattttcaaaatcgactatccttatagatgccttaataaaatattcatatgcactttttatatcatacatcactagacaaaccttacataacctgcagtaacaatatacttctatgtatttgtcattagttttttcagaaagatctaaaacatttttaaacgctttatatgactctttataatttccctgcttaaaatccaaagttgctatttgagacaaagataatagtttaaaatgagaataattaaaatttgttgctatttgaaatatctccaaaagataatttttacattgtgaaaaatcctcataatagttaccatatatatatgctatattattgagcgaatccaatacataggttaaattctccataaaatattttttattagtacaaattttattatattttaaagctttctgcatatctcttttttctatgaacgtgttactcaaaatatagtacgcatagaattgaacatcttccattcctttattacatttctcaagtacattattacatatagagatagctctctcaaattctttattaatgtaaaaattaaatgcttcttcagtataaatcaaaagttcaaattctaacttataatattttttcaaaagcttttcttgattacgtatatattttctgctttcttttaatttagaattggtttgaagtatacgcactattctttttaatgcttgaaactgcacatcatactcttctatactttcagcaagtgttacagccaagttaaagtatatttgtgcctcctctattttttcatctataagtaataaatctcctaaaataattaaaagcctaattccacttaaactacaatcagttctaattgtctttactaacctttttattttgcttattactttttctctattatcaacatagattatatgcttatatttccccaaataatattcaataattttattaatatttagagaattttcaaaatgataaagtatttcttctctatatttatcaggatctattttttctaatacctccgctgccctttcattaatactacttttgtaatatgcatccattttttctgttagggttgttttaattaccttattagaaatattataatatatacccgaatcttcttctatgtactctactgcacccctttttattaactttgctactgttgcttcaataattccatcatcatattccttaaaaaacatttttataatacctatattcaagcgtacattaaatatactcatagcattaactacttctaattcaattccatccatgtcatttatctgattttgtatatttttcacaagagaactgtgtataggtatctcatttatcttatcataagatgttacccataacccatcttcctcatttacatatatatactttctcacataaagtccttttaatacttcaattataaatcctggatttcccttggttttctcaaaaatttttttagcaaattcctttggaggtgtaattgttccaagcacagatcctataagttcattagtaccattgaagttcaactcattaagtgtaatatctgtaaaactaattttaaataaatttataaattgacttatattattatttacataaattgactcatccgaatatgaaaacataattactatattcttagtatttcttattcttctatagaagtatcttatgaaatcaatgctgaaatcatctatcttatctaagttatctactataataactaacttcttcctctcagccataatattcataaaatttatgcatctatcaaatagttcatccttttgtttcatatctactgaatcctttttaatatctttaagtatctcgaatatctcgtttccaagttctctttcgtaggtttttattactctataatcataactcacaagaatttgtttaaaaatttcatcaaaaacatttctttttatatagtctctgctgccaaaactgtagtaaacattatccatattaaacttaaaaatatatttaatttcctttaaaaaccttgtttttccgatcccgcttttcccatgtacgataaataaattagatttactaatcccaccttttgaaaaattacatagattaagaaccttttttatttccttgtctcttcctactatttttacattataatttaatttttcaagagctcttacttcataagtatctacatatttttcaaacgcatcattaatatgatttactatgtcttttatatttgtgtatctacgaccaatattagaaaccatcttgtcaataattggtgctatttttagcaaaaattttttatgtgggttttccgaacacattatatcatccgtattagttttatcatcacataataacgacaaatcatcaatttcaatattcttgacaaacttactcctgcataattcaaatagcaaaatgcctaacttatgtatttgttctattatatccctttgatagtcattataattatccaaattaagcttaaaatttattgcttcaattctgctcttgtacttcttattaattctatctaattcagctgagattaggtcattaagtttaatattaaacttaccatctttataatcaacatatatatttttaatgtcaatgttcttgtatacatatccactgcaatttaaatattgaatagcaacacacacttgtaaaaatatatctaaaatactattctcgtctaaagattctactatatctgaaagtctatcggcttctctatttatttcgcacgtgtagtaccatttcatatcatctgtaaatttattatctatactatttattacattcaaactatacaatctatatatacttttttcatttaagttcactaaatttataaattcattttttatataatcctttgcactatctgaaaaattctttaagtctattatactaagtcttaattttgagtcatttcttaaaagatctataacttcaagtgatgttaaaatttgtttatcatctattgtatctactattctatatctattattaataatgttcacaagactcacttccaataccattataaagctttttaaaactcaccttatataattatacccttttgtaattttaaatgatagctatttttacctattattccattttttattcgttacctttgtaaacatttcttggaaataggaggtaataacctatattacctcctacataattctttaccttcaatcgattattatattaatctacttacaattttttcttgtatattcgaaaaattcattatatgaattagtttctttctcaaacttactttcatctattgtaaactgttctattttccttttatcaagctccatagttccttcaaatataaaagttgcatttcctataaaatcaactgaataattcccattactatctttatgaactatagtctttatggctccaccatcattgtatacatttatagcattatcaaactgaaccttttctcctatgcaacttactatactagatgccgtcattgctgtcccacaggatttagttaagccaactcctctttcgtaagttttaacataaatattactactatctataacttttacaaagcttacatttaccccttgaggtaaaacagattttgtgctgttgcccttctttccgatttcaactaacttatcactatctatattgttaactatagctattaagtgcggatttgttatgctaaccgcagtaaaatcaaactcatcagataattcaggtattttatcaaaaattaatttttcttttttatagttcaacggaagagtttttacatccagggaaacagattttatatcaattttaactgtttttactccttcatatatatcttcctgtaattttacccaatacttggattttaaagtttctatctccacactttctttatttaacatttcaataacatatcttccaacacatctaagtccattgccacacatttcagcctctgaaccatctgcattaaatattctcattttagcatcgcatatatcgctcttctggacaaacaaaattccatctccgcctataaattttgctctattacatgcctgaattgcaatatctcttcttgtttcatcatctagattataattattattgtactcatcaattaaaataaaatcattcccagtaccatgacactttaatatattaatttccactataaatgcatcctctctaatatttatttccatatatacttcatttactaacaattatagcattaaatttttgtactgcacaataatcaatgacatatttagtccttattagcacttacatcggaagttattttaattaaaatatacccattagcatcgtaacctattttaattttatgatcatatatgctgtttcctttaatatttttatcataggaatctatattagcataccccttcacattcttaggtaatttcagacttaaagtaataccatcctcatctttttcactttctgtctctataccaaataagctctgtttctctttcataacctcaggcagtgtagtacttttcttcacatcattcacagccttaaccctatccgttatttccttatccaaatttgttttttcgatagaattatctgcatactgaatgttatctatgttataccttccaacaacatttagaatattatcagctgacttgtactgtgctgaactaagtataagcatatctattttttttatattgtgtgaacttagaacattgaacatgttattcttatcattaacttctgataaatatgccggtacatctattagtatatttttatcattatactgtattactatactttggccattctctaaactatataaattaagaataccacttttactttctttaataaccttattacttactatcttactcttttgagatgcatcctcagaatagtcctttactggtatttcaataaagctcactattattgtagcaatagccactaccaaaaatgatagatttatatatccaattctttttcttcttatttttcttattacacatataattataactactaaaaacaaaagtagtcccaaaatcaaaaaaaatattgccataataccaccttcttacaatgtttatattggtattattgacaatatttattatatatattcatttacagcataccaccgtctgcagttattacttgagctgttatataagatgcttcttcactagctaaaaatatagcaattttcgcaatttctgaagtctttccaaatctgcacattggtatttcattttctaaatcattcttctcatcatttgaaaaagatccattcatctctgtatctataacacctggtgaaattgcattaaccctaattcctgaaggtgccaattcttttcctaatgcctttgtaaatgaattgactgcacctttagcagctgaatataatacttcacaggaagctcccacgtttccccatatagatgatatatttattatacttcctgattttctttctaacatatacttaactgctaggctagtacaattaaaaactcctctaaaatcattatccatgatttcattgtagtcattttctttcatatctataaaaagtccaattttagaaatgcccgcattatttacaagtaagtctattttcccaaacttgctaattataaattcaaacatatttttcacttcactatatgacgttatatcacatttataaacttctgcaattccaccactattcttaatactttttagtgtgtcaagcgcccctttttcatcattcctataatttattacaacctctatccccatcttcgccatttcctcggcaatactttttccaattccacgtgatgaacctgttataagcgctaccttacctactaaatcttcaaacataaaatcacctttactttaactctgcaattaagaattttatatttatgcctaattttaaaaacttagattcatattcagttacaatatttttatcgaatccacttttatgtagatcataggtcataaattttatttgaaaaccacactccttaaaataatctaaagactcaacaaaaagaccatcatcatcagttttaaaccatatttgactattgggttttaaaaattccttatattttgttaaaaatttagtgtgcgttagtcttcttttcttatgcctatccttaggccaagggttacaaaagtttatatatattcttgctatttcatccttatcaaacacttcatttataaaagctatttgaagtggtgctattctaacattttgtacttcactttcagttatttttctaagtgcaattgctattacctcatcttttaggtcaattgctacataattcttttctggatgcttattagctatattggttacaaaatctcctcttccacatccaagctcaagataaatctcattatcatttttaaattcttctctccatttgcctttataatctttagggtttactatacacaatggacttgcttccatttcaggtcgcgcccaccatttttttctaagtctcatcttatcctcctagttattatctcgtaattatatcaatgccgctattttcataaaaaaattaaacatcatgtctactggtttatctataataagatttgctatggatagtgttccagaagctgtaggaatgattgggaatataactgctaaaagtataatagtaccatacctgtatacagaatccggtattgctttaggaaacaaatcccttaacacatgaaatccatcaaaaccaggtataggaattaaattaaataaagcaagcaaacaattcattcttacaatttctattattaacctatatattatagatgtaattaatgtacttggtaaaaaccttaaaaacagactgcatacaatagaaaaaacaaatgcaacaatcaagtttgctataggacctgctatagaaacctttaaatcatcccttcgatagttcttataagctgccggatttgtttgtacgggttttgcataaccaaatcccactaatataatcgctgcaaatccaaatggatctaaatgcgccatcggattaagtgtaatccttccttgaaatctaggcgttttatctcctaacttatccgctacaatggcatgtgcatactcatgaaaagtgaatccaataagtactgctggtatcattattaatctataaattatctcttgtcttatatccataaacttcccccttaatcacctaaaaataaaaattgaaaggatttaataattataccttccatcttgaaacaatattacataaaatttataagtcctcatataatgtgagaacttataaatttataatttactttattggtgtttcaataagtttgttattatctacatctctacttattattccacctttttctgaatctccgtacatagttacatacatattattaaatgaaacacttttgttattcttaatatttatagccttacctttaaggtgatccactgcatatatatcgcccaaatcagatatgtatacatatttgggatcagcaggttcctttaaggttatcttattccaactagctttaaaatttgaatcttggccacttgaactattattcgctctattatttagactagcagtatatatttctactattttatcattcacaacatttgcaacatataaatttccctgtccgtccacatatagaagttttggattatttactcctggaatttctatagtttgagaattatcagatgtagccatcattattttattatctgctaaatcttctaatacaaccttatcctctgccttaaatacatagtaatccccaacctttgtaattcctaaaggcatttttgtaatcccttctgatatatcaagcctatcaatatatgacgctccgcttccagtttgttcctttatatacattatagtatttaaatcattagattgaagttgaacaacattagaactgctcctagttaagtcataagttcttcctttgttattaaaatccaacgcttgctgtttttctccagttaaaggatcgcacttatatacttttatacccgagtcaactttttcaataactactaatacatcctctgaaacacgccactttgcataaacatctgatagatcacagtcaatctgaactttcttatctactccattactcatttgcacaacatgtaatgcattgtttgatatataagatacatattttcctgtagatgacacttggattttatcagcatcctgtggaatcgaaattgaaagaacctttttcttttcctctgtcttaattatcctatacgttacttttgtaatatttttaaacatataagcattcatgtaataaagcaatccactttgaataattatagaaattagtacacatataattacgtttcttaattttttcatcctacagtcctcccactatttcggctcaacataaattatgtcaggtaccgctctttcacccgttgcattggaaggattgtttattatctcgccattgtagtacatagctgtcgagcctccaccatcaagacatgcagcatttaccgcacctagcttatgcatcaaaacctgaacatcgccaactgttgctcctaatttgacaccttgtcgtccatctataaccataaatattatacttttatctgctctttgacctattgctgttcttggatttgttcccgaaacactattcgcctgtatagtattcttaccattcttaataagatatggctctgttataacagcttctctgataccacttttaatcaattgatcaggtgaatatgttcctccaacctgcaaattgccatctttatctatagttaaggcacgattttcttcctctgaagtaatttcactccaattactattatcttgaggatagactatttgcccattagacataataaaaccagttggaatagcaccaactccaccactttgtttattaggggaggtatccttaaaatatccaccatttatggctgctacggctttatatctctttgccatttcgcgagtcgtttctcctacatatcctatctgtgctgcataacctattttaactctatttggatctttgattataagaacattagcagtaaactttccatcaccatcaacctgcattcgtgttatatcactatctgtattaatttttataacgtcattcttagattgcttcgttgtcgcttcactcttactggattcctgtaatatactctggatcttagcatcactaaaaaaccacttagccatatatttgtgtgcacctgttcccattaatgtacttattatagtatttctaacatttgtaaacggaccatataatgaatatggaacaacagtaacacctgtaaatataatttcaaaagctaaaaaaagaattatggtcttaactatgcttttctttttcttatatctagttcttttatcggccttacgactttttttactcattgatatccctttcccacatcattttattttatattcaccaaagttccccttggtatattgtcatatatccattttgcattatctattggaagccttatacatccatgagacgccttattcccaagtttatttacttcatttggctctatattcttattcttatcaaaaggcacactatgaaataaataatttcccataaattgtacccaatagtatgcaccttcattatatttttgactataaaaagaatatcctctttcctttatggtatactcacctttaggtgtatcgtatccattcataccagaagaacaaacaaaagaattaactaatctacttttagcatcatatatattaactctttgcttttctaaatccacatctattctaagtggtttttctgcttgatttaaagctataaatgcagtattgcttgaagcgtcattttgattactaggttgtgtcactgtagtactcttagcaggtactgcctctttctttttctgcttttttacgtgctttttagcaattactcttttagactcacccaaagtcgtatacttatgtatttcattataagctaaaaccccaattaaacataataatactaaacttgatattataaatataactttcttctttctcttccttgccttacgaatatccaaatccctgttttttatatcttcttcattataattatcataaatcaaaagtaccaactctcctcatgatatatatctccaatatttgtatatatattacgatgcatattattctactattcaacatattatacaatatatattatctttaaaatcttactaagtcaacatcatggctgtttatttacaatttatacatacaaccttaatctatcttttgtagaactaatttaccaccacttacagaagctattctattattaaatagaccttcaaacgtacctttatactgatattttgtattgttctttaaatttatcaatctcgaagacgctaaatctttaaaatatatattcccacctgatgaaataaatatattatctgaatcataactaccatctaaattaactgttttaaactttgttgctgccgccgcaacttccccataatatattttatttattttaccacttctagcagaaacataaacattattgttttcatcaacacctaaaaactttaaactagcatttccatctacaactatattatttttaattttggtagaccttaccgtgccatttattgaatcctcatatataagattatcttctcttgatgttacattgaatcttcctatttgattatttagtgttctaatttgagttagctcttcatctacatctaatctatatactcttgaacctgcacctgcgtatgacacttttatatacattactcctgtagaaactgacattctcatattaacttcagtacctcgtcttgaagctgatattacatttgatttaccatttatatagtcttttacttcttccttatattttttttcagcattataggaatagaaccttagctgcccagaaacattctctgctattatcattctattagtatccggaacccatctatatgctagacattgtacgccatttacaaaattcaagttcagctgctttcctgtattagtatcgaaaaccttaacgatgctgttttccatatatgctgtataacttccatcatctgatatagttatatcacttgctgaagatggcactgcaacattaggttttatttctttctctgtgtcgaagttacccatattagatatctttatattattctcttctccaaaataaaatctatcaagataaaaatatactgataattggacaactaaggatatagaagcccatacaataattttttttgatgctctcattttttcacccctagtgttttacaattattgttgttgccacagttctctctccaaatttatcacaaggattgttaataacatgtccattgtaatacattgtagtagatgctccaccgtctaggtttacagcattatatgcattttcttgctccattattttttgtatatcctttattgttgctcccatttgaagtccttgtcttccgtccacagttaaaagcaaaatcgctccatcttttctttgacctatggctgttcttggttgtgctccctggctgtctattgaatttccgaaagaatctctagtctgatcaacaccattaactataagtgttggtccaaaatttatagcttcaaccacattttcatttaaaagctcacgaatactatgatctcctaccactaaaacaccacttttagtaattgcagctgttcctttttgaatagaaagctgatctggatttttaggataaaccacttttccatcacttataattattccagtcggtaaagctcctgtacctgtccatacaactttagagccagaactattttcttggaatccaccaccatttactgctgcaagtgcattattatgtttagctatttcacttgtggtttctccttctaccccaagttttgaagtgtaacctatcttaactttagtagggtcatgtattacaagcataagcccactgaatttatttccttgtatttttttgcattctatttgttcattatgattagctgtatttatatcatttaagttttgattttgtgctccacttgaggtcccaccaccaacgcctctaatttttgcaatctgtgcatctgaaagaaataatgttgctaaatattggtgtgtaaatgatgacatagctgtacctactattatcttctttaagttattaaacggaccataatatactatccagggtgcagtgcctatgccaaataagaattgaaacattaggaaatatataaaaagtttaatttttgatgtttttttacgttttaaattcttcctatgttttttccctcttgagtttttaatatttctattattggaatacatatatttctcctttccctatgttaattgagaaataattattgatttaatgatacaagcttcctaattctaagcatagcttatattatacaacattttttaaaattttcacagtaaattttgtaaagttttattaaaaccattttcttttaaatttattttttgacaaccgataatttttattatataatatacataattaaacaatacacgttttcgaaagcaagggtggtgaacatgaacgatatatctacaattttcaaagaaaaaaaattaaaattaacacctcaaagaatagctgtttataaatatttgaaatcaacacacgagcatccatctgctgaaacaatttataaggcaattcaatcagattatccgactatgagtttagcaacagtatataaagcattaaagactttagctgaagtacacctaatccaagaattaaatgtaggtgaaggtaattttagatacgatgctaattcatcatctcatccacacatacagtgtttatcctgtggtaaagtggatgacattatggggataacctttgataacttaaacaaagatgtttcttctcatacagattacgatgtcatatcaaataaactttacttttatgggatatgtaaagactgtaaggataaagcttaattatatcaaatattgctagttgtaataattttaaacattccgcatatataataaacataacaatatgtgcggggtgttttttatatgaaatttaaaattttttttcttagactaaaacatatatattatataattttagcaatagttttcatagttctttttacaatttttttagtttcgagaaaatccatagaaacgttcaacatttttacagaaaataaaattataaaaaaatatgatgttaccggagacggattgaaagataatatttacataaaaataaacaataataaatattctatagctgtaaaatctaaagataaaatctatactttgcagccaagtcacaaactcaatagtttaggaacatataaaagttattcgcctttgaaactaatcttaacagatgtctcaagagataatataagcgaactcttcactcaaagttcagaaaacaatactaacttgcagcacctattcatatgggacaaaacaaaatttaaggacatacttcacaccactaataacataataggatttatcgacgttcacaacaataaaacacctaaaataatatcttcaaattttaataacaacgatttagtattttcaaactatatacttgttaaggataaacttaaaccttattactgtaattatccatcaaactttattggtaaagatacaatatcaacctttataaattatatacaaagtcttccatacagtagcaatacaaaaccaaatgatttatttcatgaatccggaaaaatctcctgttttaatataattgataaattagctagtgcaaatagaaaatatgtttttcaagatggctctttctctgatagtgattatgataaaaatggtgaaatatctgatgtaaaatggattttaaacttcaaatcgacctctaatttagtaaaagaagattgcaaaaatatgtctgttaagctgttcttaaaaagcataggcgattcaaaatctcaattctattttaaaatatactcaataaatgtaatttctaattaaaattaaaaaatgggaccgcagtttggcgatcccaagggggatggggggtttagcataaaacaaaagcctaagcccttatcttatactaaatggagaattatttctccacttacattttatataatacccaatttcctttattatattcatttgcttataatttatcacaaagaattttcactgtagttaattcctgaacaaatgttatttattaattcatctcttccttgttttgtagcagatgagaagaaataaaactcgtcactatcattaaacttcagagtttcttttattaatttttcatttttaactttttcacttcttttgatcttatcactcttagtagctattactatacatttgtaatcataatacttaatccaattatacatagtaatatcatcttttgttggcttgtgtcttgaatctacaaggagtattaccttctttaattgttctcttccgaccaaataaccttctatagtttgagaccacttttcaagttcctttttagaaaccttggcatatccataccctggcaaatcaacaaaataaaaatcattattaatcatgaaaaaattaacaagtcttgtttttcctggtgttccactaaccttaacaagttttcttctatttgtaattgcatttattaaagatgattttcctacatttgatcttccaacaaaagctatttcatcttttccatctataggaaactgctttttccatgctgccgaaattataaattcagcttgtttaattatcattattaataccaccaatcaatgcattttctaataccgtatctacttcttctgcaagtataaatttaatttttcccctaatcgccttaggaaccttgtttatatctttttcattttgtttaggtattataatagtatccactccagctctatatgccgctagtgtcttctctttaagtccacctatagctagcactcttcctgtaagtgttatttctcctgtcatagccacattgtgttttacctttttatcgcttaatgctgagaccattgctgttatcatagtcacacctgctgaaggtccatctttaggaactgcaccttctggaacatgtacatgaatatccttattcttataaaattctttgtctattccatacttcactgaattagctctaacataactgtaaccagcctgtgctgattccttcataacatctccaagttgccctgtaagttgaagctttccatttcccggcattataactgcttcaacaggaagagtatctccaccataagccgtccatgccattcctgttacaactccaattttatcttccttatctatcttatcagctgaaaaaacatcttcgcctaagtactttttaacagttcttgaatttacgctaatactactcttatccttttctactatttcagttataatttttcttataatagcagctattttcctttcaagacttcttactcctgattctcttgtatagttttctataatataatatatagaagaatccataaaagttatttttttatcctcaggcatattatgttcttctaactgcttaggtattaaatgttcttttgcaatatggaatttctcctcataggtatatcctgaaacctcaataatctccattctatccataagaggtctcggtatagtctcaagcgtatttgctgtagtaacaaacataacgtcagataaatcgaaatccaactctaagtagttatccctaaacttattattttcagaagtatcaagtacctctaaaagagcatctgctgattcccctttatagcttgagctcatcttgtctatttcatccaatagcataagtgggttgtttgacttcgcctgcttcattccataaattattcttccaggaatagctccaacatatgttcttctgtgacctcttatctcagcctcatcatttactccaccaagagatattcgtacaaaatttctattaacagcatttgctattgattttgctatcgaagtttttcccactcctggaggcccaaccaaacacagtataggtccttttaaacttttgctcattttctttactgcgaggtattctattattctatctttaacatctgaaagtccatagtgttctttatttaatatttctcttgctctttttatatcaagattatcctttgttttatctttccacggcaatgaaagaatccaatctaggtaggtttttattcccgcgccctcaggtgaatatgcccccgcattttctaattttttaagttcatgcaaagctttttccttggcttccttagttaactttccttttttaattttttgtgtatactcttttatttctgctttttcttcatcatcatcaccaagttgatcctgcataacctttatttgctctcttaagtagtattccctctgtgacttatctattttttctttaaccttaacccctatatttctttcaagttccaatatctgcaattcatctttaattactgttaaaacgttttccaacctttccttttcatcaatggaattaagtactgattgtttttgttcttgttttataataagatatgaactaactatatctgcaaatttgcctggctcttttatatcctttaaaaaatcaactgcatctttggtaactgctcctgaaagttttacatattttccaaattccttagttataattctcatcaaagccttaatttcgtactcttcgtaattatcttcatctttaaattcagtaatttctgcttctataaatggctcctgttttaaatacttatcaatctttccacgactaattccttccaccaatactcttacagcatcacctggaagtctaagtatttgttttatactacaaattgttcctactgaatttatatcatcttcatttggttcctctatctttgcatccttttgtgttgataaaaatatttgttgatcattcatcatagccttttccaaagcctcaatagatttatccctaccaacatcaaaatgcaccaccatataaggaaatactataaggcctcttagaggaattaaaggaagaactttattctcttgattcatatttctcccctgcctttcaataaagtatagctagtctaatatattatactataaaataacattttttcaacttttaaaagttatattcattcatatttataccatctgcagttaatacactttttgtattttttttatttaattcaatacttttatcgttacattccttttttactaaaacataacttaatatttctttaatatttttcacacctattacttttatattagagtaactatcaaaagatttattccaattatcatatggtattataaccaattcagcaccagcctttgctgccgctgtaaccttagaacttactccaccaactggttttacaattccatttaaggttatttcaccagtcatagcaaccttacttttaataggtaattttttcagtgcactaaatatagcacatgcaatacttacaccggcagatggaccatccacggcatatcctccttgaaaatctatatgaatatcataatttttaatgttaatattaaacacattttctatcattgatattgcattttctgctgatgccattatactacttttcttttttacttttttattgtacccacttatttcctcttcttctattatccctgttatttttatttgaccaacggagttttctactctcactgctgtagcttcaacatccataacaattccattgtctatcccaaaaacccccaaaccattaacgcacccaatccttgaaacactgctcaactttttgtatgaccttaaagaatatctaccattttcagcaatccacaaaatatcctctgcttctattcttcctctattttcgtttattacaatgccacaagctaactgtattaaattgattacatcccttccatttgatgaatacatagctataagctctaatgcttttgaatctatatttacatttattttctcaacagcatttttagctataatttttatctcctcagcatcaagtgccctaaagaatatctctatacatcttgaccttatagctggattaatttcctcaggattttttgtcgttgcccctatcagcctaaaatctgctggaaacccttcttcaaaaacctctcttatgtactcaggcatattttcacttgatgaattgtagtatgcactatcaaaaaaaacctttctatcctccataacctttaaaagtttattcatttctattggattaagttctcctatttcatctataaatagtactcctccatgagctctcgagactgcccccattttaggttgaggtattcccgcatttccaaatttccctgcgccttgatatataggatcatgcacagaacctatcaatgggtccgctattcctctttcatcaaacctcaaagtagttgcatctatttcaacaaattttgccttatcattaaatggtgaaaaggcacatgtttttgcatactcaagcgcaagtcttgctgccgcagttttgcctacaccaggagggccataaataattacatgttgtgggttaggtccacatatagatgcctttaaagtttttataccatttttttgaccgattatctcatcaaagcttttaggtctactttcctcacataagggaatagatagtctaatctttctcatatcattaagtttctctaattcttttttattttctttgtcaatactaatcctaccaaactgttgattttttaatgcatagaaaaaatatattcctataataatattaaaaatcatctcaactataataataacattatacataaacaacctcccttaggtataagctagtagatatactaacagttatttcatataataatattatgtgatatttgaattttaatatacaaaaaatcgaatggaataaatccattcgattttactcaattaaaagttgcatcttatctatgcactttctatatcttttttagtttttgatttttcttttttcttaggagcttctatagcttttgctccttcttctaaaactaattcaggttgttttgtatttatagtattttctgtaactataacctttttaacatcttctctagatggtatatcaaacattatatctttcattatatcttcaactatagctctaagacctcttgctcctgtacttcttgatattgcctcagaagcaattgctttaagcgcaccatctttaaattcaagttctacattatccatttgaagtaatttttcatactgctttacaagagcatttttaggttctgataacaccttaacaagtgcaccttgatcaagtgaattaagcgttactattataggaagtcttcctataaattcaggtattagaccaaacttcaataggtcacctggcattatcttcttaagaattgcccctatatccttttgttgtttagactgaatagaagcaccaaatccaattgtacttactcttgttctattttcaattatcttgtctactccatcaaacgctccaccacaaataaataatatattagttgtatttatttgtataaattcttgatgtggatgttttcttccaccctgaggcggaactgatgcaaccgtaccttcaagtatcttaagaagagcttgttgaacaccctctcctgacacatctcttgttattgaaggattctctgattttcttgcaatcttatcaatttcatcaatatatattattcctttttctgctctctcaacgtcgtaatcggcattttgtataagcttcaaaagtatattttcaacatcttcaccaacatatcctgcttctgttaatgtagtagcatctgctattgcaaaaggaacatttaaaaatttagctaacgtttgtgcaagaaatgtcttaccacaacctgtaggtccaagtaaaagtatattacttttttgaagttctatatcatcattatttgataaatttgagttaatcctcttataatgattatacacagcaactgataatgatttttttgcatcttcttgacctacaacatattgatctaaataatccttaatttcactaggtttaggtaaactaccaacatttatctgaggagtttcttcaaattcgtctgcaattatttcagaacataattctatgcactcatcacaaatatacacaccaggacctgcaattaatctctttacttgatcttgactttttccacaaaacgaacaacgtaactgctttttattatcgtattttgccatttgaacacctcacttaaaaggttattttaacatgcacttggtacatgaattttccatatctggatttaatattttacaatctttcatagagttatttatcattaatcaataaagctctatgtaccttacacaaaatgtaattaatttaattactacaatagtgaaatcaataaatcataccttagaatattcccaaaggatatcaatttattcagctttaatagagaattcatatattttatattatgaacaattccatataaccacttgctcacaaaaatcactactgtagtaatcacgtattaacagtaactttataatcaatgaaagcatggtgttcaccttacaaaatattattgataatgaaacctatgaattcaattgttacaaaatccattccttgggataccttaatactgcttagatgtttttatctattttatattcaaaaaatatttttctaatgtttagttataacttcgtcgattaacccatattctttagcttcttcagcactaaggaagtgatctctatccgtatccttttctataacttcgataggctttcctgttctctcactgtatattgaatttaattttttcttaatctcaagtattctttgagcatgtattcctatatcagtagcctgacctttgaatccacctagaggttgatgtatcattatctcactgttaggaagagcaaatctcttacctggtgctcctgctgtaagtaaaaatgaccccattgatgcagccattcctatacatattgttgatacatccggttttacatactgcattgtatcgtaaatagccattcctgatgttatagaaccacctggactgtttatataaagatatatatccttatcaggatcctcgctctccaagaataatagctgtgccacaactaaacttgcagtagtatcatttacttcttcgcctaaaaatattactctatcctttaatagtctagaatatatatcgtaagacctttctcctctactagtctgctcaattacataaggaactaaactcattaaaattccctccttaatttttctaaacttttttactatatatttaaagttaattgctgactttaaatcaacaattaacttcatttatatattattatatatttaacattttttaaacatttgttattctacaacttttgcgttttcaactagtaagtctattactttaccattgattacatcttgttctatcatacttctttgagaatttagaactaattctgccattttatctaagtctttatttgtatactgttgcgccatttctttagctttttcttttaattcttcctctgttgcttctactttttcaacttctgatattttttccataactaattttgttctaactctcttgtctgcagtttctttcatataatctcttactttttcttctgaactatttgtgtattcatagtaagatttaagatcaagtccttgatatctcaatctactttctaattccttaagcatttgatctgtttcgtttttaaccataacttctggaatctctatcttagcattctctactgctgcatcaacaactttatcttcgaattcaatcttagccttttcttcatttgctttttccattttgcttctaatgtctgcttttacttcatctaaagtatcgaattcagaaacttcctttgcaaactcatcatctaaagctggaagctcttttctctttatctcttttattgtaacttcaaattttgctggttttccgtttaattcttctttaccgtattcctctgggaacttaacatttacatccttactttcatctttttttagtcctactaattggtcttcgaagttatctatgaaagttccgcttcctatttctaaagaatagtcttttccctcgccgccttcaaaagcaacgtcatctacatatcctttaaagtcgataacagcaatatctcctttttctactgcttctccatcttcttttaattctattctagcattcttttcctgcatacctttaagctcattttcaacatcttcgtcagttacaggatattcaaccttagttacttcaacacctttgtattctccaagttcaacctcaggttttactgtaaccttagctgtatatacgaaatcttttccttcttctaatgttactatatctatttcaggataagcaactggatgtatatcattctctttaattacttctggatatgtatcatctatacaaaaattaatagcatcttcatatagaactcctactccataatagttttttataatattaagaggagcttttccttttctaaaacctggaacattgaatcttctacgattcttgttataagattttattactgcttcattaaacttgctctcatctacagttatctcaaatttaattacgtttttttctaatttttccattttactattcattatgaatattcctcctactcaagtacctattagcttatatattataacatacttaattaattatttacaatttaattttaacttatatttatatattataacataaagttgtggctttatagaaatttttctaatttttttttgcagtcacttatttcattataggaaaaaaaattatttctgtaaacttctattattaaatttccatcataatttacattatcaagttcataaaatatttccttatagttaacagtgccatctaacggcaataagcaaacatggtcctcatctctatcatttatgtgaaaattaacaagtttatttcccattactcttatgtattcctttggttctttattagccttatatgcctgctttatatcaaaagtaaagaacaaattatctatagatttatcttttataaaactcaaataatcaatatcactcgacatacaccatgatacattctcctgcgctagctttatattattctctccagcaatatatgctatttttttatatacttctacagctaattctctatctatacaactaaaatccttatatttcatgccatgaaaagtataataagatgcgcccaacttacttcctgtcttgcatattttctcaaagagtaaaagcatttcatcacgtcttcttttatacggatcaaacaaaaaaggctcaaaaagcgaggaaagtgcatgaactgaatttatgtctatgttaagctcatgcttcttccttaaaagcttatccacaaaaccgtcttcacattctaaaaaactatttataaacacctcgcaggtattaaacccaagtttttttattatttccaaagtgtcttctgtatttacttccggataaaaaactgccgaagataatcctatttccatatataaatcatccttttatagtatctaatttgaagttgtaccatctgccttcatataagttgtattcccatctataactatttctatacctttatctgtaaggctattcatcttaatatcatttcctgttagattagaatttgtataagacttatcggtaatactaaatttccatacatacttgctttgtctgttatcaaaccatggaagttgacttatatatactattgtattatcgtccacaaacttaggagacacaccccatatataacctggattgctactcaaaatactatctttattaaaagtagttccacttcctgatgtataggctttgtatgttatatcttggactactccacttgcatcaataaagaacatgttttgagtatctttttcatagataacaacattcttactagatggacttatgttatactctccattcaaaccactcaaatccactgatttcacaattctttgattattattttctccacaaactaatgaaacttgctttccatctggcaaatttactttaagagattcatcttgtgctttactgtttttagaagaagtttttttgctgtccttaactattgtcccaccacttttcttgctaggagttttactacttacattactggatgcactgagcttcggaacttttacattctttagattagttttaaaacctaaataaactaaaactaaaaatattacacatattaggagaaagatactgatatttcttctttgctttctttttctttgctgcttttcataatcactgctaaatatacttggcttagccatctcacaacctccttaaaaacatctatttttaattatacctcataactgcccattttagtaatttttttttaactgtaataaattaaaaaagcttgaacaacgcgaagttttcaagctttttcactcaatgcctttaatttatttaaaatactctttcattgctctatattctacctttgcctcttcccttttaacctttattgctgtaagaaaagcttttgctgtatctatacaagtgaaagcccctactttatactcagcagcttttcttcttatactaaatcctctagtgccaactgtgtttcctctagttggagaatttattataaggtttatcttaccgtcgcctatagccttcattaaatcatctgtgcgaagaacttcacagtctattccttgtttttgaagaaactttcctgtacctaatgatgcatatattttatatccaaactctgtatactttttaataataggcacactttcttgtttatccacatcttttatggatacataaaggttgcctccgtcctttggaacttctattcctgccgctctaaatcccttataaattgctacttcaaaatcactatctattcccattacctctcctgtagatctcatctctgggccaagataaatatcaacatttgcaagcttttcattagaaaataccggaaccttcacagcatagagcttattatcttttttaagatcaactccataccctagctccttaagatttttacccgttaaaatttcaaccgctaatttaaccattggtactccagtaaccttacttaatataggtactgttcttgaagctcttggattaacttctattacataaacattttcgccatcataaacatattgtatgttcataagccccttaacttcaagcgccttagctaagcttttagtatacttaacaagtttatcaacaacttcttttggcaatgtatgataaggatacattgttatactatctccagaatgtactcctgtcctttcaatatgctccataattccaggtattagtatattttctccatcagaaattgtgtccacttctatttctgttccctttatatatttatcaattaaaacaggatgttccgttgaaagtgttactgcctcagtcatatatttttgaagagccagtttatcataaactacctgcattgctcttcctcctattacataagaaggtcttacaataacagggtagcctatttccttaacagcctcgtacgcttcctccatacttgttactgccattccctttgcttgtggaatatttagttcttttaggagctcactgaatttttctctatcctctgctagatctattgattcaaatgaagttcccagtattttcactccatttttataaagcttatcggccaagtttatagccgtctgccccccaaactgaactattaccccttctggtttttccttttctataatattcattacattatctatatataaggattcaaaataaagtttatcagccgtatcaaaatccgtacttacagtctcaggattgttattaataataattgatttataccctgcttcttttatagcccatacaccatgaacacagcagtaatcaaattctattccttggcctatccttataggtcctgaacctattacaactatcttcttatcatcagtaacttcgttttcatcctcattctcatatgaagaatagtaatatggagtttccgcttcaaattctccactgcaggtatcaaccattttaaatacaggcttaacattattaacgtttaatatattttttattttcccttcttcaaggctagttatcctagctatttctgcaactgtaaaacccatttttttagctttaattatacttttatctttatctttattgttcttatcttgaagttccttttccatatctattattctatttattccgttaagataccaattatctatttctgtaacttcatgaatttgttttacatccacaccacgtctaaatgcctctgctattgcaaaaattctctcatcatcctgcttttttattttttcaagaagctctcttactgtagtatattcaaatttttcaagtctaagccctgatatttttccttcaagagaagttaccgcttttaagagggcactttcaaaatctctgtcaattgccataacctctcctgttgccttcatctgagtaccaagatgcctttctgctgtgttgaatttatcaaatggccatttaggtatttttacaacaacataatctagcgctggttcaaagcacgcacttgaatttttagtaacataatttttaagttcatctaaactgtagcctacagctatcttagctgctattttagcaattggatatccagctgccttagacgcaagagcacttgaacgactaactcttgggttaacctctataactatataatcattacttttaggattaagcgcaaattgtatattacatccaccttctattttaaggtttcttattatcttaagagctgaatgtcttaacatatggtattctttatctgtaagtgtttgtgatggagctgtaactatgctatctcctgtatgtactccaacggggtctaggttctccatattacatactattatgcagttatctttagcatcacgcataacttcgtattcaagttccttccaaccggcaacactctgctctaaaagtatttgtcctatagggctcatttttattcccctgtcacaaatttccttaagttcctccatagttgaagctattccgcctccagtacctcctagggtaaatgccggtcttattataactgggagcccaaatttattcacaaaatcaatacattcatctatgtgagttgctattatacttttaggtacaggctcatctatttcttccataagatttttaaactcttctctatcctctgctttttttatagcctcactatttataccaagaagtctaacattatatttatcaagaacaccagcatcatttaaattcatagctaaattaagagcggtttgccctccaaacccagctaaaattccatctggtctctccttttctattatcttctctacagcttcctctgttaatggttcaatataaaccttatccgctatatgcgaatctgtcattatagtagctggattactgtttacaaggacagtttctatcccctcttcttttacagctttacatgcttgtgtacctgaataatcaaactcagctgcctgacctatattattgggtcctgaacctattattaatactttcttaattgtcttatctaatggcataattatcctccttcagtgtcttaaaataatccatatatacaataagcttaaaatcttctaaagagctctttctaaacactttactgaatcaaccttaacaattttatcttcattcataagtttacaaattggtcgaataagtaagttgtatctgttggtcctggcgcaccttcaggatgaaattgtactgaaaacagtggaatacttttatgcttcattccttctacagtgccatcatttaaatttctgtgcgttattatcataccattttctaatacactttcttcatctaccgcatatccatggttttgtgctgttatatatgctttatctctttgtacatcataaataccatgatttccgcctctatgaccatatttcaatttgtaggtatttcctcctgatgcaagtgctattatttgatgtcctaaacatataccaaacataggacgttttcctataagttttttaacattttcaatagcttctggtatagatttaggatcccctggtccgttacttaagaaaatcccatcaggattaatgtttaaaatttcattatagtcggtatcataagggaatatagttatatcacactgtctctcttttaaattttcaattatatcatttttaattccaaaatccattactgctactttatttccgtttccagcaatatgaattatttctttggtacttacagtattaacataatcatctactatattggaggcatccatcattttcttcaactcttcaattgataattctccatttgaaattatgcatttcatagtaccataacttcttatcttctttgttatacttcttgtatccacaccaaaaactccaactactcccatgttttttagcatctgatctatatttatttcactagtataattcgatggattttcatctatatttttaacaataaatcctttcgcatacacacattttgattgattaaccgattcatttactccatagtttcctattaaaggatatgtcatatttattatttggccagcataggaagggtctgttaatatctcttgatatcctgtcattgaagtgttaaatacaatttcaccaaattcatttccctcttttccaaatcctgttccataaaaaactgttccatcttctaaatatattatgcctttcatcaaacaatccacctcttctttattttaagcttcccagcacgatttttaatacaatatacatatatttttatatttatacatatattatctcatactttaccatactgtcaatgcttgttttatgatattttcttttaaattgaaggattagttttatgtattcattatttatatttatgcatcactattcataaaaaaaccttccgcctttaagacagaaggttttttgctaaaatactctaattacattttagctatatcataaatatatacttaacctcttgttggttaaatattacatttaataaattctctttgaaaaataaaaagtcttttgccagacgcaaaagactataatactctccataaaacaaaacttttaatccttcttagcctctctggaccaatcattaaaggtatattaaatttttaacttactttaataaatactaccactattcatatgctctgtcaatagcattattaaaatcttttcatactattaaaaggatatgctctaaatattacatgaccatataaagatttaagcgatattggtcctatatatctactatccttgctcacaggtctattatcgcctaaaacaaaaatattaccatcaggcaccttgtatttagtattttcagctaaaaagcttccgcctccagtataaacatcaggggcaagatagtcttcctttagtgcttttccattcacatacactttaccattctttaattcaattacatctcctgctaatccgataactctttttatataaatattattttcagcatctccagaataaaatgtaactacttcgcctttttttatagaatgtgtatataggcttaatttttctacaaatataacatccttatccttaaaagttggcatcatagacggcccatctacatttgctcttgcaaatacaaacgtcctaaaaatcactgcaatacctaatgccaccactaataatatagcatactcttttacattttgccccaagcttttactttcctcattttcttttcccatcattttacctccatatttcgcataacataaattataaagttttcaatttaaatatttatatctaacaataatataaataatcaagtctttctgataaattaatatctttaggcttccactgcctcaaagagcaattctcttttactatttttcttttagaagctcctacaaaatcaaaaaaatatttatcaagccaaggtggtgtccacatccccgatctacatacatgtatactgtaaacattattataactttcaatattagtaagtttacaataatcaacatgaaattctttatttatttcattaaaaatttctttattttcataagtatatggactatatattatcgatgcatttttaattatattatcccctaaaagttttcccagccaattagagcaattaacctcaaacattaaagatttaagtccctcatatccaaggtccgaatgggcatctatgttaaaaacatatttgcaatcattttctttagctattctataagaccatttatgcgaatcggttacataaacttttgcatctcttcttatattaaaaatcctatttatcttctcccaaaaaccatctattattttacccactttaacttcattagctatatctattccaatattattatatttaaagtatctcttgtaccatatggcttgtacatttttgttgctttctaaataagaaccacaccactccctctttattggaataaaataatcccagtcaatacttagaagtacattattcatgaaataaatcacctctaaaattaattatactacaaaatgcagctaactgtataaaaaaacaagcaaattaccatacattgtaatattattagataaaatatgcaatagtacaaattaaaggtattgtaaaattaataaaaatttcacaatacctttttttattttactcttctactttcaatgcttttaacctctcataaaaattagcactagccgtctctatatatactaagaggaaaatcatacttgcaattagtattaaaaaaactaatatgccaaatacaattataaccagcggactaatagtttccttaaatgctattataagcactaaataaattacgataggaataaatgccattatctcccatcctataaaggttaaatgcagcaaaaataatttccacttattgcctttcatcatttttttactttcatttaaagcttgatatgctcctaaaccagggttatctattaatatataataccccatataatatctatatgccgctatcattgcaggtatcaaagctataagaaacataatataagcagtaataatccacattacaatattaacatcttctatactacttccatgatttaaatatgaataataggctaatactgcaataattactattggtactaatgctataagcgaccataaaagcatgaatacatatattaacaagtaaagcactaatgaaggaacaaagtttttaaagcccacaaataatttttcaacttttggtttttctcctctaacaattttaagaaaacaaaaccttgctccaaatgataatgctccagttaatgcaatttgtattacatatcccacatatggtattgcaaaagacagggatataagaaagagcaataatagaattaaagccgaagctccccattttcccttaagctgctgtctagccatttttctaagctctttactgctcttgtctattttaatattttgttccataggcttcctcctattaacaaattaggtactgcaataaagcatcacagtacctaattaaaaataaaatatttattcttctacacctaacttattttctttaagttgtcttaaattttcataaaaattagctttagacgtttctatatatggaagaagaaataagctggctactaaaattactatataagataatattattaatacaatagctataggaatacgctctgaatcccctgcaacaactatcaaatatataaaactacatattaaaggtactccacttaaaagattccatcctataaatgttaaacgtagccagaataatctccacttgttgcccttcatcattttcttactttcaacaatagcctcataagctcccatatcaggattatcatttaaaatataatatgccatagaatatctaaatcctgctataattgctggtattaaaagtacaataagtaaaaagtatgctaaaactaatttcactccaacacttggatcataggcagcatcacttatgcttatacctattgatataagaattattataaatggtattatagctataagcgcccataaaaactgaaatattgccattaataattgaagcactaatgcagacccaaagtttttaaagccgctaaatagattttcaatctcaaaattttctctccttgcgattctaacaaaacatgacttgaatccaagagttaacgctcctcctattaaaagacgtattactgttggccctatatatggtattgcgaatgcaatagatacaattccaaacacaaatataagtaaaactgcagctccccattttcctttgagctgctctcttgacatacgtctaagttcactgctacttttaactgattgattttgttccataaaaatcctcctaaatataatttcaattaataaactaaatatcataacaatcaaaaatactgtgagattaattataccatcacagtattatatgactaattatcacttttctgcgtatttgatttttatttgctttgtccatctttcagccatatataaaaattagctatagctgtttgcatatatgtcacaacaaatatttaactagctactttagaatttgctttaagttgctgtcttgacaattctttaatctttcctattgtcatactttttttcttttgttccataaaaatccttctgtaactgattttattccgtacctacaggaagtttttataaattttttaatacattttaaattcctattatatattataatattccgcgtatattttcaatatgttttattccttcttcgtccaaaaacttctcaattccgtttattatatcaatgcaaatatctggttttataaaattagctgttccaacttgaactgcaaaagcccctgccattataaattctatggcatcttcagctgtatatattccgcccataccaactacaggcacactaacatttttgcatacctcatataccattcttagtgctattggttttatcgctcttccagaaagacctgcgcttatattatcgaagataggcttttttttctttatatctattgccatccctttaaatgtattaacaagagatattgcatctgctcccgcttcctcacattttacagccatatccactatatcctctgcattaggagacaatttcaccataagtggttttgtacagacctttctaacttgtgatacaacattataagcaacttctgattttattccaaaagccatgccgccgtgctttacattaggacaggatatattaagttctatcatatcagcatctgtattctcaagaagctccatgccccttaaataatcatcctcacagcttccaccaaggttaacaatacatactgtatctatttttttcatcttaggaagttctttttttataaactctttaactccaggattttgaagtcctacactattcatcattccgcctgtgacctcaaaaactcttgcaccatcattaccttccttaggattcaatgtaagtccctttgaagatatgccaccaagccttgaaacatcaaaatacttactaaactcttctccaaatccaaaggtgccagaagcagcaataacggggttcttaaaatctattccacaaatatttactttagtcatttaatatcaactcacttcctaaaaatactgggccctctttacaagctcttcttcttccacccttagttttacaagtgcatacaaggcatgcacctattccacatgccatttttttctccattgaaatatatacaggaacattcttttgttcacacattttaacaactttatacatcattatctcaggtccgcagcataaaacataatcgtattcttctggcttaaagttatctgttacataccccttatgtccaatacttccatcttctgtggacaactttaactctttaacatatttttccacattatccacagttttactcacagttttgaagccagcataaaaatcaacattacaattttttaagtttttagccagatataccattggtgctacacctataccaccacaaactatagccacttttccacttatcctttttacgttaaatccatttcctaaaggtcctgttatctttatttcatcgccgctctttaatttagataaaatttcagttccttttccaacaacagagtataagaacgatattttttcgtcatctgcatcatatatactaataggtctagaaagtgttggttctatatcccaagctcttaaaagataaaattgtcctggcctcacctcaaattcaccctttatactaagtttgtatataccatcttcaacttttatattttcatatactttttctactgtatacttttccttcatcaaaattcccccaaaattcataaagtttttctgatctcgtctctcatattaatcgctgcaagccttgcacactcatcaaatattttttcaccgttttcttcttttttataagcaagaagtattccccttgaggaatttaccactccaccattaccttctcttaaatacaaacttacttcctttgcagttccaccttgtgctccatagcctggaattagaaaaaacatatttttaaatttatttctaatttcaacgccttcttcaacgtgagtacatccaactactgctcctattgaagaatacttgctccttcccgtagccttttgacctaaatcatatattttttctccaacctcatcatatacgttttttccgccctgagtctttatatattgtatatcataggctcctttattcgatgttctaagcaaaataaataatcctttttccattttttcaatataaggcatataaggctctataccatctaaccccatgtaaggatttaacgtaacaaaatccgcttcaaaatcaccttcaaagtgagctttagcatacatttcagctgttttagctatatctcctctttttatatcagcaattgcaatagcctttttttctctcaaatattcaagtgtccttttataggccaaaagtccttttaaaccataagcttcataatatgcaatttgcaccttataacatgaaacaacatctaaagtcgcatcaattattttcttattaaaattaaatatagcatcttctatactattaaatttcttacaaaactcttctggtacatatgtaatatcagtatcaagtcctaaacacacatgtccctttttctcaacactatcaaataatctatctataatcatatcttttcccccacattaagttaaatttctagcgcctttgctcccttatatatttcatcacaatattcacacttatactcacctttttcttcgtctacaagcttaaatttatgaggaatataactttctacagaagttacacatctaggattgctgcactttataatattattaacttcacttggaagctttagctgtattttttgccttattttttcatcttctattatatttacagttatatttggatctaaaaacccaagtactgcaaggtctaaatccattacattttcaatttttattatatctttagctttattctttttacttattgcgttcattataagggctgttggaaattccgcctctccaagcttaagataattatatatttttattccatgtcctgcttttatgtgatcaattactatgccattttttatgctgttaattgtaagcatattataacacccccattaattttgccataagagccattctgacatacattccgttctttgcctgtttaaaatagtatgccctttcatcattatctacttcatatgaaatttcattgactctaggaagcggatgaagtattatcatatctttttttgcagtttttaatttattttcgttaagtatatagctatctttaagccttatataatcttcctcattaaaaaatctttccttttgtactcttgtcatatagagcacatctaattcttcaataacatcctcgattcttttagcctctttatattctatattgttcttatcgagtatctctttttttatgtattctggaactttaagctcatcaggagaaatcaatactattttattattatcatatctggacattgcttttattaaagaatggaccgttcttccaaattttaaatctccacacatacctatggtcaaatttgaaagtctcttttttgttcttctcattgttaatagatctgttagggtttgagtcggatgttgatgtccgccatctcccgcatttattactggaattgatgaatacatggaagcgacctttggagcaccttctttaggatgcctcatcgctgcaatatctgcataacaagaaactactcttatagtatctgcaatagtttctccttttgacacggaacttgagttcggctcagaaaaaccaacaacctgacctccaagtcttaacattgctgtttcaaaactaaatctagtccttgtactaggttcataaaataaagtggcaagtattttaccttctgctgcatgcatatattccttaggacacgctattatatcgtctgcaagtttaaatatttcttccagctcatctacagtgaaatccataggatcaattaaacttctaccttttaacatagtcaaacccccttcttagtttctctgaactaaatttaaaggtattttttacaaaataaaaaccttcctcaattaaaggaaggtataatacacctattactagcttatcagcaccttccaggcctcacaggaccttaattaaaggtttattctattctcagctcatattaacactttaaaatttatttgtcaataagcagtttacaataaattaatttcagtatatatctaatatatgatataatcttagtatattttaaataatactgttgaaagtagtgataatattgattgaacacattattgacatcataatagttctacttgctaaattgggctatgcaggaacttttttcggaatgttatttgaaagtgcttgtataccaattcctagtgaaatagttcttccctttggaggatatctaagttctagttctgcaccacaaggacatactttaaatctagttttagtaataatttctgcaaccttaggcggaactgttggatccattcttgcttataccattggtgctaaaggtggacgaattcttgtttacaaatacgcctcaaaacttcatctttcaaaggaaaagattgaaaaaagtgaagctgtttttgacaaatatggagataaaataattttcttatcaaggcttttacctataataagaactttcatttcattacctgctggaattgcaaaaatggactttactaaatttaccatttacactcttgtaggatcagcaatttggagcacacttctagtatacgctggatttgtaatgggcaaaaattgggaatcaattcgttcttatttccacatagcagattacttagttgctggagctataattttatttatagtatacagaattatagtgtacataaaaaagaaaacaaaaaaataattcatatgaagttgcctctaattgtttaaggcaacttttatttatcaaaaaaatatatttgctttacatcatacccacttttcttcatttctgatgatatgacatcaaccctctcaagtttcaccttaatcacatgaagcattatatttaatctctttatattatttaaatttaattttttcatagctatagcatattcatattctttagagtaatcctcaataacttctgcctttccaaaacactggtatccattcagtttgttgaatccactatattcttcataaactgaaattaatactttatcatttttcaaaatgttgaagtattttctacctccttcagttataaagtacataaatccattttcatagatatactctattggtgttccaataggcctgccttcactgcaactgcacaaagtacatgtattgtgctttagaaaaaattcctcaattttatccttaagcagctcattaggacattccttaccttcattgtctataatatcttttatatccataaaaaaatccaaagctgcattttcatctctttcacttttgctaaagtttttctcaagcacaacatcaaattttataaatatatttctaactttcaaaatcaaattttctttattaggatagtataatataactttctttttactaagccactgtagatttgaacttataaaatcctgcaaatttttttctatcttacttataataaaggctacataataaaattcgctatattttttttcaaatgtatctacagtacagtatcttgagtttcctgttatcaaagccgctttaaatgcaaaatccttagtaatttcgtcatgtataattaatatatccttaataatatcaactcctttaatctacatttgattgaaatgtttatttttatataagaatgcatttgctggacatttttgaacacatctaaaacatgatatgcacttattactaaattctatttcatcgccaaatgttatattattagtaggacattcatttacacaccttttacattttgtacacctattataatcaacttttaggctctttttaggccatttatgaaaatgcttaagcgaaaccttatatgcagctttagacacagctgttaataatgctgattgtttttcaatatatccttcatcctttaaaaatttatccactatatttttaacctcaagaacagcttcttctttcatttccttttttctatctttcggagtttctttaaaaaactttgaaagataataattgtttggcattggtattgatcttgtgatcattacatcataccctttattagagagaagtttattaatctgcctcccaccatatccaatatatgaagcctgagtagatacaataatgcatcttttattatctaccgacggtagattttccttaatccatcttacaaatatatcaggaaaaacctccacatgaatagctgaagctaaaacataaaaatcatattctttagatactcccttttcctttaatatatcaatcatttcgcactgtatatttttttcttgaaattctttaactaataactctactacatattttgtatttccagtaccagaaaaataaatcgctgcacctttcataataacctccaaaataaatactgttaaatttaaattttatgcatgtattttttaataaactatcttgcttcactatatactaatattatatttctttcaacaaagatatatatttaaacttcaatatatattaataaaaaactgccttaaaatgattttaatcatcttaaggcagctctatgaatttacaagttataggattatctatacattaaataataaatctgagtaagttgggaaaggccatgccttcttatcaactaatacttcaagagcatctgcggcttctcttaaagctgacattttttcaaaaacatcaaatttataagcatatgcttgatcataagcatcagtaatagctgaagctttttctgttgatgcttttagttctttaagatcaaaattaagctttcctgtaagcgatgaaattttattaataagatcactttcagtagaaacatctgcagttggaaccgctgcttttatagcatttagagaatttgctaattcagctgtatattttataactgctggaataatcttttttgaagccatatctatcattgttaaagcttctatatttattgcttttgaataattttcaagagcaacttcataacgtgattctaattccttcttagttaaaactccaaatttctcaaatatagcaacgtttttgtctgctattaatgcttttgttgcttctacagttgtttttatatttggaagtcctcttttttcagcctctttaacccactcatctgaatatccatttccattgaatacaacctttttatgatctttaactgtttctgttaaaattgcttcaatctctgcatctacattactagctttttccagtctatctgctatttcagataaaacctctgctactattacgtttaatacagtattaggttctgctacagattttgaagaaggaggcattctaaattcaaatttatttcctgtaaatgcaaatggtgatgttctgtttctatcagttgcatccttctctacagcaggtactgtagaaatagctaaatctaattttgaatttcctttagtacttgtagcttttcctttctctaactgttcaaggatatcctcaagctgatctccaacaaatactgatattatagctggtggtgcttcgtttgcacctaaacgatgatcgtttcctgcattagaagcagaaaatctaagtaaatcagcatatttatcaacagcctttatagttgctgtaaagaacaataagaattgtttattatcatgaggcatatcagttggctcaagaagattaagtccgtcatctgtacccattgaccagttgttatgctttcctgaaccatttattcctgcaaatggcttttcatgaagtaaacatacaagtccatgttttaaagcaattttcttcaagatttccattacaagctgattattatctgttgctaaatttccacttgtatatatagtggcaatctcgtgttgtgctggtgcaacctcattatgctttgttttagccgttattccaagagcccataattctttatcaacatctttcataaacgctgaaactctttctttaagaacaccaaaataatgatcatctagttcttgaccctttggagatggtgctccaaataatgttcttccagtaaatataaggtcttctctttcgtcataagattttttatcaactataaaatattcttgttcaggtcctacattagggaaaactttttgggaagtagtattaccaagacatcttaaaacacgtattgcttgtcttgataaagcatcaacagaacgaagaagaggtccttttgtatctagtatttctcctgtatatgaacaaaatactgttggaatacaaagagttccatcctttatgaaggctggtgaagtacagtcccatatagtatatcctctagctgcacaagtagctctaagtcctcctgaagggaatgaagatgcatcaggctctcctttgattaactctttaccagaaaacttaaggattacttttcctgaaccttctggatctataaatgcatcgtgtttttctgcagttaaaccagttaacggttgaaaccaatgagtaaagtgtgtagctcctttttctattgcccactccttcattacttttgctatctcatcagcaacagtaacatcaagtgactcacctttatctatagtcttttttaaagctttataagttggcttagtaagacgttctttcataacagcatcattaaatacattttcaccaaacatcttgtctattctttccatttttaatcccctttcaaatcttatgtaatatgtaattcgtatttacctaacaataatattataataatgcaattatcaaaaatatgcaacataaaatagaacttttttaatttttattgtatatcttttattatttattttaagaaaacgtttactatttttttaccctaaatatttttttactgtttgtaaattttttcatattaaactattaattttagcagccttatttttttaaattaaaaatcaatctaatgtttttttgataatttcaatgtcgaattttcaaaatatttttttgaaaatttcgaattttatctatatatgtctcaatcactttaacaaaggcttattggcattatatgtatacaatcctttttaggtgccatcatatttattcaaaataattataaaaaaagatgacttctgattaacacagaaatcatctttcttactataaagagtttttattgttattaataattaggatcatttggcataacaattgcacatactatatatgctaatatacccgtgccaaatacaaataaaagtactatccatagaagtctaattatagtagggtctatatttaaatactctcctatacctccgcatacaccacaaattttcttatttctactagacaagtagagttttctgtccataatttaatacctccgccaagtgctatcataaagccttttattttgtagcacaatttaatcataaagttttctagaaatcacttctaatctaatttaactaataattgtcctgattgtacttggtccccctctttaacaaatatacctcctacagttccatcttcacttactgatacatttgtctccattttcattgcctctattaccataaggctgtcacctttttttactttatctccaggtttaacaaataccttaactacatttcctggtatacttgctcctatctcctttttattggagctatctgctataactatctcttcaactatttcagacttagtactgctaaccttatctttgattttaatctctcgtctattaccattaacctcaaatacaagagttctatttccttgtttatctaatttacctatgtgcaaaagctgcactactaaagtttttccctctgctatctcaagttcagatatttcaccttcagctaatccatggaaaaatacatcactacccattctacttaaatcaccatactcatttttatattttaagtattcttcaaaaacatcagggtacaatgcataacttattacatctttatctgtcggttcaattttattttcttttttaagacgaactcttatcttatcaaaatcttcatctggtaaaagctctccaggtctgcaggtaatagcttcttcatccttaagaacaattttttgaagttcttttggaaatccacccttaggctgccccatcatacccttaaaatatgatactacagagtctgggaaaggcatatctttagctttttcaagaatattctctgacgtcaactcattttgaaccataaatatagctaaatctcccaccatttttgaagatggagtaacctttactatatcgcctaacattatatttacttctctatacatctcttttacttgctcaaatctatggcctaaaccaaagctttcaacttgaggttttaaatttgaatattgtcctcctggtatctcgtacttatatatttcagccgaaaccgcttttaatccagactcaaatttactatatacaggtcttactgtactccaatagtcagatatcttctgtaaatctcctatatccatcttagtgtctctgtcagtgtttttaagagctgctactactgaattaagagctggttgacttgtaagtcctgacatactattgaaagcagtatctgctatatcaacacctgcatgagccgccattaacaccgtagcaacaccatttcctgttgtatcatgcgtatgaagatgtataggaatagatatttcgtttttaagtgctcttataagtttaagggcagcatatggcttaagaagcgctgacatatcctttattcctaagatgtgtgctcctgatttctctatttccttagctaaattaacataataatttaaagtgtatttatctctatttgtatcaagtatatcacctgtataacacatacaagcttctgctactttaccttgatttaatacttcatctatggcaacttccattccctttacccaattcaatgaatcaaatattctaaatacatctattcctgatttgctagattgttttataaactctcttataacattatcaggatagtttttatatcctactgcattagctcctcttaaaagcatctggaacaatacgttaggaactctttttctaagtctctctaatctttcccatggagattcctttaaaaatctataagcggtatcaaatgttgctcctccccacatttccattgaaaataaatcctttgcaaggacagattctgcctttgctatttttaccatatcaacggttctaagcctagttgccattaatgattgatgggcatctctcatagttgtatcagtaagtagaagtttatcttgatcctttatccattcaacaagacctttgggacctttttcatcaagtatctgctttgttcctcttaatggttcctttatctcgtatttaggaacagatggaacatcaacttcaattttatgtccatgagtttcatttacaactttttctcctataaacttaagaactcttaattcagtatctattctaggcgtaatttcaaaaagttctggattattagctataaagtttgtatcacataaaccttttctaaatgtttcatgattcaatacatttataagaaaatctatgtttgttttaacccctgatatgtaggtttcttttatagcacgtatagcttttcttattgcatcctcaaaagtcctagaccaagaagtagatttaacaagtaaactatcataataagggcttattaccgcaccagtaaatccatttccaccatcaagtcttataccaaaaccggaaccagttctatagacatctatttttccagtgtctggagcaaaactattagacggatcttctgttgttattctacactgtatagcatagccatttacgtgtatatcttcttgactatttattccgacttcaggtgagttaagtttataaccttctgctattaaaatttgactttgtactatatctattccagtaaccatttcagttattgtgtgttctacctgtactctaggattcatttctataaagtaatgatttccatgtttatctagtaagaactctaatgttcccgcacttctataacctattgatcgtgcgattttaagtgcatcttcacaaatttcaagtctcttttcttcagacattgaaaccgctggagttagttctattaccttctgatgtctcctttgaacagagcaatctctttcatataaatgaacaatattaccatacttatctccaagcacctgaacttcaatatgttttggtccttcaagatacttttctataaatatgtcttctattccaaaagcctttttggcttcactttttgcacttctacaagcagcaattaaatcttcttctttttcaactattctcatacctcttccgccgccgcctgctgctgctttaaccataacaggatatccgcatgttcttgcgaattcaatagcctgctgttctgtctctattggtttttcaactccaggtatcgtctttacacctgctgctttagctgctagctttgagttaattttatcaccaagcttatccatcatatccccagttggacctataaattctattccagcctcagtacatcttctagagaactctgagttttctgataaaaatccatatccaggatgtatagcgtctacccctttttttaacgctaaattaattatttcatcaatatttaagtatgcatctactggacctttgttttgtcctataagataagattcatctgccttagttctaaacagagcaagtttgtcttcttctgagtatatagccacagttcttatacctagttcgtgacaagctctaaaaattcttattgctatttctcctctatttgccactaatactcttttaaactttttaaccacttttttgcccccttgataaaaataaatttgtatatgattaattatatataagcgttaaaattatttcaaataaattttaaatttaataacctattatttttaataataaaacttaaaagagagaactttaatatgaatatagtctcccgatgttataaaatttttaataaatgctttttgttgtataatttataaataaaatcaaatatatttgataagttaaaaatgtactattctctagaaaaaggaggcagcaatacctatgataattaacaccttgaaattattttttaaagatgcattaaaaaatagtattagaaatatctctattactattgcttctataactacggttttatgcagcatatttattttagaaatattttttcttttgctatgtaatattaaactaggaatttccggagctgcccctaaccgagaaatacaggtgtttctaaataacaatataaaagtcgcagataggcaaagaatacataataaaataatggcattagatggtatcgttaatattgattttgagagcaaacagaaaatctcatactatttaaaaaagcacttaggtaacagatacaaaaatatattattaaattctctacccgaatcatatacggttagagttaatagtgaagaaaacattccgattataattgctaagattagttgtttaaaaggaatatcagaggttgataaaaatgcttctatcgaaaaagaacttacggctattattagagtagctcaattgattggaattcctctttttattatattctcagtaatatcaatttttttgattaaaaacacaatattacttactatatattcaagacgtgaagaaattagtgtaatgaagtaccttggtgcaacagattggtttattagatggcccttcatttttcaaggaatgataatttgtttttcaggcactatgatatcattaataataatttttttattgtacagttttatatataaaaatatcgcttcttattcaatagaagtattcttaactttaatacccccatcttttatacttacaaccatgtcatggttttttttgcttactggaacaattataggagctctaataagtggctttactataaaaaagttcttaaatatataaaaagcatatttctttaagtgcaaaaaataatataagcccaaacgttctattttgagttgaagcttatatttaacctaaagtaaactttttattttgtaagcaaaattttcaacattatatgctcctcctccccaataatattgtgatgtaaacttgccatagcttttaaattcaactatatctttttcatttgcctcctcatttttacctccttgtattagtaaatgtattttaattgtaccaattatgtattcatatgtaaaacaaaccattaattaaaaaagcattatactacattattaaatagattttagtatctttcatactattactatatatcttaccatttttcgtcgcttgacacttacatatattggtatataatgtaaatatatcatatattgaaaggaaggtaaaaaatgaaaaacacaaaaaaaattattagtttattattttttttagtagcttttgtaattatcacaccgtctataagttctaaggctgataatttgattcctagaacaaacttagaaatttctaatggacaagtattcaacgaatcccaaataagattaagaggctggggattaaatgcttctggtataaaggcaatcgatatatatgttgatggtacctggaaaaaaactttagttaaaggtgacggctttggattatcaagacctgatgttaaacaagcatttcctgagtatcctgatgccgattattctggatatgattattatatgtacctacctgacggtaatcataccttaagagtttgggctataggaaatgataattctaaagtttactctgaagctaatattactgttgacacctctaactcaaaaggaacacagctagtaaactatgcaagaaaatttataggtgtaccttatgtatggggtggtgatactcctaatggctttgattgctcaggcttagttatgtattgttatgcacactttggagtaaatctcccacattatacaggagatcaagttaaatatggaactgttgttacagatttgcaaccgggagatttattattctttggttctacatctgatccttaccatgtagctatttattctggtaatggttatatgatagaagctccaaaaactggtgaaaatgttcatgaaacacctgttaggtcatattctatagcaaagagaatattttaatttaaattatgtaacattgtaataaatagcatgtcataatgtttttaaagcatcctttgacatgctattattctattaaaatttttatattatttttaaagatatttgttacttatatttgagtctcctttgcaaactaaaaaagctacatacaaatatcagcatattaaatccaaataaaaaaaggctgatataaatatcaaccttacgtaatgccttaattcagttatattctggtgcacccagagggaatcgaacccccgaccttcagattcgaagtctgcgactctatccaactgagctatgggcactaaaatacgttcaaaaaattggagcgggtagagggaatcgaaccctcgtaaactagcttggaaaggctagcactctaccattgagttacacccgcttatatatattggtcggggtgacagggattgaacctgcgacctcatggtcccaaaccacgcgcgctcccatctgcgccacaccccgttgcattcaattaaaaaatggtgcgtcatcagggattcgaaccctgggcaccctgattaagagtcaggtgctctaccaactgagctaataacgcacattaagacttttaaaaatatatggtgcgttttaagggattcgaacccctggcccacggcttagaaggccgttgctctatccaactgagctaaaaacgcacgcttggagcgggtagagggaatcgaaccctcgtaactagcttggaaggctagcactctaccattgagttacacccgcatatttggagcggaagacgagattcgaactcgcgacgttcaccttggcaaggtgacgctctaccactgagccactcccgcttattttattttaattggtgcaggtgaagggagtcgaacccccacgccgtaggcgctagatcctaagtctagtgcgtctgccaattccgccacacctgcatttggtggcttatcggggagtcgaaccccggacaccatgattaaaagtcatgtgctctaccaactgagctaataaaccatatattttatattttttaaattggctgggatggcaggattcgaacctacggaatgcaggagtcaaagtcctgtgccttaccacttggctacatcccaacaacagggtgaatatagggtctcgaaccctagacatccagaaccacaatctggcgctctaccaactgagctatacccaccaaggttttaaaaatggtgcgtcatcagggattcgaaccctgggcaccctgattaagagtcaggtgctctaccaactgagctaataacgcatattttggagcgggtagagggaatcgaaccctcgtaactagcttggaaggctagcactctaccattgagttacacccgcaggtttatggtgcgttttaagggattcgaacccctggcccacggcttagaaggccgttgctctatccaactgagctaaaaacgcacgcttggagcgggtagagggaatcgaaccctcgtaactagcttggaaggctagcactctaccattgagttacacccgcatatttggagcggaagacgagattcgaactcgcgacgttcaccttggcaaggtgacgctctaccactgagccactcccgcttattttattttaattggtgcaggtgaagggagtcgaacccccacgccgtaggcgctagatcctaagtctagtgcgtctgccaattccgccacacctgcatttggtggcttatcggggagtcgaaccccggacaccatgattaaaagtcatgtgctctaccaactgagctaataaaccatatattttatattttttaaattggctgggatggcaggattcgaacctacggaatgcaggagtcaaagtcctgtgccttaccacttggctacatcccaacaacagggtgaatatagggtctcgaaccctagacatccagaaccacaatctggcgctctaccaactgagctatacccaccaaagttttaaaatggtgcgttttaagggattcgaacccctggcccacggcttagaaggccgttgctctatccaactgagctaaaaacgcatattttggagcgggtagagggaatcgaaccctcgtaactagcttggaaggctagcactctaccattgagttacacccgcttgtattggtcggggtgacagggattgaacctgcgacctcatggtcccaaaccacgcgcgctcccatctgcgccacaccccgatgtcgtcttcgttttgtttatcgcttgacgacaaaaattattctacactatatcccgactttcgtcaacccttttttttattttttttataaattatttattttagggtgtatttcaccatcaactatttctatgtaagccgtgctattactagcatttcttgggtatgatacacttcccggatttatataccatattccatcattaaaatcgatttgagaaatgtgtgtatgaccaaataagactatgtctgcctctaattcttttgctctatactctaatttcatcatactatacttaactccatatctatctccatgtgttataaaaaacttctttcctcccaataaaaaagttttttcagaaggtattttctcatcatcacaatttcctctaatatatattaattccccattatagtattttttaatctcatctatatcttgaacattatcccctaaatgtatgagaacatcaacatttgttaaattactacatgctttctttatatagtgttttgaaagatgtgtatcactcataactgatataatcattttattcaccccaattcaactttttcatttcactgcatagtttttccaaagcaattgctctatgacttatagaatttttctcatcctctgtaagctcagcaaatgtctttttaaattccggaacatagaacaaaggatcataaccaaaacccttagttccgatttctttatctgttataaacccacttatttcaccttctacttttattgaatttgcctcatctataatcagtactatagagcatacaaactgagcatttcttttctcaaacggaacaccttctaaaagtgagaggagcttttcattattttttttatcatctccatgtattcctgcaaatctagccgaatatattccaggtgcgccctcaagctcatcaactgtaagacctgaatcatctgctattaccatgcagtcttttctcattttatatatttcatatgcttttttatatgcattttctataaaagtttttccatcttcctctacgtcaatatctatgttttcttccttaagtgatactatattaaaatcaaattcttttaatatttgttttatctcacgtattttattttggttgttacttgcaattattatttttttcacttttccctctccttttagattttaatttttttaagcaacttagcacaatttttaaattaaactcatattatataatagattaattatactaggatggtgcagcctttgaaatatataggaccatttttcaggcttaattcacttaataagaattccataaaaaatcagttggttcacctatcaaaagaatccataaaggatataatttttaattctaattgtggaattaaaatacctacaaaggacttaaaattaaagcagtcctctttaaatgatattaacacatttaaatccgtttctccacttataagtttgtatagaaaatcaagttgtaaactttattctttaaacaataaattaaagtggaaaaattcaaacataaaaaaagatattttaatttcatctaatgcttatatgagtttaagtcttttagaattatgtgactactataacaattttaaagacacaaaccccaaaaaattcaatatgagtaatttatatttaataatcataaaaaagcaattagatttttataattcttacctgaggaatttcgagggagtttttgtggataaagccgatatttcaagtgatttaatatcagaaatcaagctcgaaaataaagatgaaaatttcaaattttccaatcaagcatttttaatgtgtgcatattacaaatattccataatgtcagatgaaaagctttctaaggaatataaaaacttttctttagatattctggatatgtttattaatttcagaaatgacttatacagtttatcatttacagaattaaacaaactaaccttagctctaaacatattttatgattatagtaaaaatcagaaatgctatgaactattgatggatgtgtttgaatatttaagcgaaaactacagtgacataaatttaaacgacaatatagaaaatcactctttactatgtttaaattctattttattatacaataactccaatatatttaagtttaaggaatatgctttaaatatatattcatccttaagtgatttatacaatccatcattaggtattttcataaaagactctgataaaaaggaaattaaattttcttgcaatgaagttgttctttatgttgtgaattgtatattaatatccgaactctgtgaaaataaaagtccttatgaaagcatgctcgtaaatgtctttaaacatcaaattatagaatccggaattataccatcctggccagaagttccatcaatacaggatgctgagaggtataaaaacttctccttaaaatccgacgatttactagaagagagtaattttaaaatgcctactatcgcaacaccaaaaagtgctgaaatagcttcaatatttttcaaaaaaataacttacaataagaaaaagagaacctttgcagtatcaaaaaaatccttttacagtgataataacatgttcttattttttctaattatgtatttattcaaaaatcattataattgttaatctaaggcgattcaaacagcattacactataaatgatgtaatgctgtttttatatttaacaatattaccttaatgaatttactataagctctccatatttattttctttcaaaccttttaactgcatctttctacataccacatcattttttaacgctaaaggtattactggtaaatcatttactagttgttcctccatttttttcagaatattatcactatctccatctatattatgaagtgaatatatataatcatcataattaacatttttataatttatattcaatggtgattttgaatcccacatatcaaaaaaacttactgcgctattataccatatattgtaatcaccaaggtaaatatcatatctacctttttttatagcatcatttagtgctttttcgtcatatcctctaatatcaaaattcaacttatttctgttttgctcttccaggatatcatttacttcatttacaaaatttttgcacatttctctttcaatttgattgtctttataaattaatactatttttttacctgatgcatagtttgttttatcaatacactgcattgctaaatttatattaggctgtttaaatacatcctcacattttcctgatttaaaaagttcatacggaacaaatgtattttcacttgttaaaatatcagtagacaaggactttaaaattttatttctatcaacaaggtatgtgatagcttttctaaaattaatatcacttcctatacttaaattattcatattaaaataaagcgcctctgttctccatgttttaaatacatctatttctcccttatctttaagcttattaacttcactgagcggaggatttgaaaaagcatctatatttttagagttttcaaaatcagtagttgaatatgcacttacatctttttcattatagtgatacttaaccttaaactcttcttttttaacttcatcttttgaaaaaaagttattattctttttaagtaaagctgtattattagatatcttatcaattatatatggcccagaatactttaatttagcgtaatctctagtccaattttttaaatctccattagtttttcttatattataaataggttgagctaattttttcagaaagtaatcacagggtgaattaagccttatctgaaaagtattgttgtcttccgcacttatagcaactccatcaaaagaagtttttccattaacatagccattaactccatatatacaattcagatcatatgcatataatttattatttttagaagataatatttgtttaaaaaaatcatatacatcttgtgctgttaaatcatccccatcgctccatttaagcccctctctaatgtgaaacgtgtattgcagcttattaggagatagagaccatttatctgctaatcccggctttatttccatagtattgtagtcctctcttacaagtccactaaacaacatgttaagaagttcattatttttaacactcttattcttcattgaatataaattttctgaaatttctccaatatcgtaaactaagtattttttttcactggaggtctttatactttcgtcctttttttcaacacatcctgttaatatcaaacacacaagcataaatgcaatacatactcttataaaattcttcatatatatctacctttatataaaatttattgtttatatatgattatttccatctacatagtaaataaacatttatagtgaattttatgctataataatgtttgtataattacataatattattactttggaggtactaaaatgcaaattgctttagaaatagcaggtctttcagcaatactaatttttacttttattggaatatggagctttatattattccataaggtattatcacaattaaaataccaaaattatttaatggaaaaattaatccgaagtttagttattgtttctaaaagcaaagatatagaaagtaacaacatagatggtatttctgaagaccaaaatgaagaaaataatttataaacctatataatgaaaaaggttaagcacctaaaatgcttaacctttttttattgcttatttaattcatcaatcattaatttgttaactattttagggtttgccttcccctttgtctttttcataacaaggcctattaaaaatccaacaaccctattcttgccattcttataatcttcaatagatttttcattttcactcaaaacttctttaacaatgttcaaaatttcatcttcattactattttgtataagtccttcttcttcaattatatttttaggagacttacctgtttcaaacatttttataataacctttttgcctatagcattagaaaccgttccttcatttataagctttataagctctgaaagctgttctggtgtgaatttcaaatcttcaatccatacataattttctttcattatctttgagatgtcacccataagccagtttgaagctgacttagcatctccacttatttttgcagttttctcgaagaaatcagccatagacatagtaagtgtaagaactgatgcatcatatttaggtattccaaattcttttatgaatctttcccttttctgatatggtaattccggtatagttttccttatactttcaatccactcatcatctatgtttaaagtaacaaggtcaccttcagggaagtatctgtaatcatttgcctcttccttgcttctcattggtgctgtctcatttttagcgtcatcccatcttcttgtttcttgagttaacttttctccactttctatcgcttttatatgtctctcatattcataattaagagctttttcaacagctttaaaggaattcatattctttatttccgttctaacaccaaattccttagcaccttttttcattactgaaatattggcatcacatctaagtgatccttcttccattttgcaatcagatactcctacacatgaaagtatactctttaattcttcaagataggttacagcttctctaggacttctcatatcaggctttgatactatctctgcaagaggaactccgcatctattaaaatcaactaaagttcctgcattcgtatgaagtaatttacctgcatcttcttctatgtgtattctctctactccaattttcttctttgatccatcctcaagctctatctctatatatccatttgtacacaatggaagttcgtcttgcgttatctgatagtttctggagttatctggataaaatatatgctttctatccattcttccaatatgagttattgagcagtttaatgccaaaccagccttaataccgtaatcaactgctcttttatttatatgaggaagtgcgcctggaaggcccatacatacgggacaaacatgcgtattaggctgtcctccgaattctgcagtacatccacaatacatttttgtctttgtagccaactctgcatgcacttcaagacctataacaatttcgtattccattatcttttcaccctcctacctataaattagcaatcttatcatgccatttagtagattgttcgtaactataagctaaattaaataatgtatcttctttaaaataatttcccattatctgaagtccaactggaagacctgaaacaaatccacaaggtacagatatagatggaattccagctatattaactggtactgtatatatatctgacatatacattgaaagtacatcctttgtcttctcacctattctaaatgctggtgtaggcgttgtaggtgttattattgcatcaaattctttaaatgctctttgaaaatcattttttattaaacttctaacctttaaagcttttttataatatgcatcataatagccctttgaaagcacatatgtaccaagcataattcttcttttagcttcttctccaaagcctttgcttctagactttacatataaatccaaagcattttccgcttctgcatctctatatccatatcttacgccatcgaatcttgcaagatttgatgaagcttctgccgaggaaataatatagtatgcagcaagtgcatagtctgataacggaagtgaacactccttaacctctgcaccgttttcctcaaaaacctttatagcttctttaactgcctctctaacaccttcatctaaaccttcttcaaagaactccttaggaatacctatctttctaccttttaagtccttatttaaactttttgaataatcttgaacaggagtgtctactgttgtaaaatccatcttatcaagtcctgctatattttgtgttaaaagtgcacagtcctctacatctctagcaaacattccaacctgatctaaagttgatccaaaagcaacaactccatatcttgatattcttccatatgttggtttaagaccaactagaccacaaaaggatgctggctgtcttacagaacctccagtttcagtaccaagtgatattggtgcttcaagagaggctactgcaacagcggaacctcctgaagaacctcctggaactctttctaaactccatggatttttagatactttgaatgcgctattttcagtagatgatcccatagcgaattcatccatattagctttaccgattataacaccattatttttctttaaattttctataactgtagcatcataaggtgacacatatccttcaagtattttagatgcacatgtgttttgcatattctttacacttatattgtcctttattgctacaggtactcctgaaagtccacttaagctttctccgctttcaattttcttatctaattcttttgcagtattaacagcttcttcttttgcaacatatagaagagcatttaccttttcatcaacttcttcaattctattaagaaaggaattggtaacttcttcaaccttaacttccttttttgaaatcatatctttaagctcatgcgcttttagcttatacagctccatatttatacctcccgaaaaaaattaatctattatcttaggtactactatgtattcttcaagattcttaggtgcatttttaataacatcctttaaatccatagattcttccacttcatcttctctgaatttattttcaatataatatgggtttacaattatatcaacattatcggtatctaattcacttaatttatctacatagccaagtatgctattaagatcctccataaatccctctttttgttcttcactaaagctaagtcttgcaagttcagccacgtattcaacatcttttttagaaacagacataatatacctcactttctttattcccaatataaatgtactaaattaaattatacaattattatcatataatctcaaatttttttaacaattttatttgcttaattaaatagaaaaccctaacaaatgacatccttaaatagcaaataacaaatcaagtatattataaatatccccaatctactatttacctatgtcaatcgctaaggtttctaaataaaaacatagtatgtaaattcctgtttaaaacactccaatatacataaaaaatgcagttccaactgctatagcagcacaacacaaagaatagaccaaactttttatcttgtcagttttatcgtaaatcttaatggcccaaataagcatagtgcatatcataaaactttgaaacattttatagttattgaaatattgtatagttacaagttgatatgtagttaatacagtaaaaattagagctagtgtagtcaaagaaacaaatacccatcctaaacactctactgttttcttaaccatattatttccccctaacacaacctgttcatatattataacattttttattatttgtaaacagtttattctgttttttacatattatttattaattgttcaaattcctcttctgttaatatcttaactccaagttgaactgccttatcatatttagaaccagcattttcaccagctatcacataatcagtttttttactaacacttcctgctacattagctccaagactctctaacttttcctttattgctgttctactgtagttttgaagcgttcctgttgcaactacggttttgcctgtaaatgcattttcaacaacttcactttcttcataaaatggagttactccaagttcaaataattcattaagacttttctctattttttcctgtttaaagaattcaacaatactttctgcaacaattgagcctatatcttgaactaaaataagttcatcataggaagctttttttatgttctcaaagcttttaaattgcttgcataaatctgtagctgtcttcttacctacatttggtataccgagagagtaaacaaaagacgcaagatcacattttttacttttctctatagcatttataagattactagcctttttatctttaaacttatccaatgacattaattcttctttagttattctatataagtcagatatactttttatgtttaatttctcaaataattgttctgctgttttctcactaaagccttctatattcatagcttctctgctagcaaaatgaactatactttttaccatttgaggtttacaggacaaagtattttcacaaaataaatgtacaccttcttttactatttcactgccgcaatatgggcatattgttggtgcttctatttcattcgtttctccctctgtctcttctgtaactcccataatttccggtattacatcatttgatcttcttacaaaaactcttgaacctatcttaactttttttcttcctatgtcatccatattatttaatgtagctctttttacaattactcctgctagctctacaggctctaaaattgccgttggactaactcttccacttcttccaacgttccattcaacatccaaaagctttgttgtagcttcttctgcctcaaacttataggctattgcccactttgggaattttacggtatatccaagatattctcttgttctatagtcatcaattactattacaactccatctatatcataatcaagactacttcttatatctcctacatattgaatttctttatttatctcttcaatagtattacactcttttaaatattcatcaactggaaatcccatctcttttatgaaattcatcatttccatgtaggatttaaaggctttaccttcattatatccaacatcgtaaaaaaaagccgatagatttcttcttgcagtttctcttacatttagatttctaagtgctcctgctgcaccatttctcaaattcttaagaggtacttctgcttttttattatactcattaaaagcagttttagtcattattgcttctccatgtacctcaaccacagagccattttttatcttaagtggtatagattttatagtctttgcttgactagttatgtcctcacctataactccagttccacgtgtagcagcttttatcataacaccgctctcatcatatgtgcagtttatagtaagtccgtcaaattttttagttaaaacatatttaagctctggaagcttatcttcatggttactattatattcagccactgcctttttattcctgttgtgccaatctatgatttcttcaaagctttgtgccttatcaagactccaaagcctacttttatgtgtatacttttgaaattgttttaaaatgacatcaccaactctatttgttggtgaataaggatatgttatacccgttttttcctcaagttctacaagttcatcatatctcttatcatattctttatctgctacaattggattatccaatacataatagctatatgaatatttatttagttcctctataagttcctgcattcttaaaatatttgattctttttcgttcatatttactacctcactaaaattttgtgaacctactacaaaagttgaagcggcgccatatcaagccttaaatttttaattcccatattttcaaaagctattgtcaagtttatgtgtccatcagctctacttgtagttattattgtacctttaccaaatttcatgtgaactaccttagctccttttacagcatcttcttcatttaaggttttaatactcttcttttcttccttcactgactttttaatcatttcattagcattaaacccgcttttggacataaaatttgaaaacatagcatttttaggtggtatatcgctacttattgtggagaacaaacctgtagtatctttttttcttctgccttcaccatctagagttacatactcttttaaattttcatctatttcatttataaaatcagattcttcaaaagcttgagtttttccaaatactcttcttaattttgcagatgtcatatataacttctcttttgcacgcgttatacctacataagcaagtcttctagattcctccatttcatattcactattaaacgaagccatgcctgggaatattccattttccattccagccataaatacaactggaaactctaatccttttgcgctatggacagtcatcatcacaactgtatcagcatcttcattataattatccacatctgcaacaagtgctgttttttccaaaaatgctgccaaagttttatcatctgaattttcctcaaaatctactgctgcatttaccaattcctctatattttctattctagctttatcttgaatatcatcagatgctttaagttcatttaaataacctgtttgttccaaaatttcttttattaaaacagatacatttatctcatctttccttcttataaaactatttatcattcctgtaaattctttaattgaagagatagctctcttaggtatgcctggtatattttctatgtctaaaagtgcatcatataagcattcttcaacctcatctgcaaattgctgaagccttcctaaagtagtttgccctatacttcttttgggaacattaattattctcttaagactgatgttatcaagtggatttcctataagcttaagataagacattatgtcttttatttcttttctatcataaaacttaagtccaccaataattctatatggtatgtttctctttataaaaatatcttcaaaaacacgtgactgtgcatttgttctatatagtattgcaaaatctttgaaactgcgcttttcttcctttacttccttatttattttaaaggctgcgaagcttgcttcatcaaggtcagtttctcccctatatactttaatctttgctccgtcctcacttcttgtcctaaggctctttaaatgctcatgtggattattctttataacaccgttagctgctttaagtatgttacccttagatctatagttttcttctagtttaattattacagcatttctgtagtctttttcaaaattaagtatatttcttatgtctgcacctctccagccatatatacattggtcatcgtctccaacaacacataaatttttgttagctgaagcaagcagccttgcaaattcatattgagacttattagtatcttgatactcgtctatcattatgtatctgaatttcctctgataaaatgctaatacatctggagccttcttaaataactctactgttttgaatatcaaatcgtcaaagtctaatgcattgttctctttaagctttttctggtaaaggagatacacatctgctatcttatttaatttaaaattacctgagttttggtttttatattgatttgcagatacaagaccgtcttttgccgagcctatttttgatattatttctttttctgttatatctttttcatttatcccaacctgttttatacattctctcatgagaaccttttggtcatcactatcatatatagtaaagtttttattataacctattttatcaatttctcttctaagtattcttacacagcaggagtgaaaagtagatatccacatattatcaatttcatttccaccaataagtgctttaaccctgtccttcatttccttagctgctttatttgtaaatgttatagctaaaatttgagacggataaatttcgagatctttaaccatatgtgctattctgtatgtaagtaccctagtttttccacttcctgctcctgctagtataagaataggtccatcaatctttgtagcagctttatattgttcttcattaagcagtttctttaaatccataaattactccactcctcaatacgtaatattttatattataacatctaaaaaagtacacaataatcataaatcataattaaaaatcagtataagctatagggaaaccaaggtataatttaatgggtgagttggtttccctatataggatttaccataatgttattagacttataaatcattttcatgtacttacaaatcgtaatttaatagaaatcctataattcctcatactgattttttcttaacaactaatttatttttctagtcttcttaaaactatattatatccatcgcttccataattaatacatctattaactctacttatggttgcagtactagctccagtttccgcggaaatatctgaatatgtatgtttctccttaagcatcttagccacttgaagcctttgttctatagttttaatttcattgatagtaaaaatatcatcaaaaaacctatagcattcttctcgattctctaatgttaatatggcatcacacaagaaatccagagtctcactttccaatttcgatttaaactcagacatgctacacacctctttcaaaactatagcataattttatcattattcatttcaaaatgccacaaaagttttattaacatttatgtccaatgtaataaaaggcaaaataaaagacagcccttggggctgggctgccataataaataaaaagggggctattcattctttttatttatcttacatacctattatagtaaacagttttaaaaaaatcaatagcctttccaaactttattataaatagctattcaatgtattatgtattataggtaaacaatttcagctattaaattccctaatattcgacttctcctattgcatttttattttttgttttatagccttcatttcatcttctgtaagctctctatactccccttcctcaaggttttcatctagcttaattcctgcaaaacttattcttttaagatatactacttttttaccttgagcttcaaacatcctttttacctgatggtattttccctctcttacagtaaccttaacctccgaaccctctttagaattatttaaaacctctagtttagcactcatacatttatacccatcgtcaagtactatgccttctttaaatgccactacatcctcagaggttacatctttgtctattttggcataatacactttatcaacatgccatttaggagatattaacctatgattgaaatcaccatcattagttaaaaacagaagtccaacagtatctttatcaagtcttcctataggaaatggctcaaatacttgatcctccacctctaaaagatctattaccgtcttgtcataatcatcagaagtagccgaaattactccatctggcttattcatcattaaatatatgtattttttataggatatctcttcgccatttacaattatctttgatttttgtggatctaattgcttgttattatcttttacaacttcgccatctaccttaactcttccatcttttattatttttttcacatcttttctagacccatatcccatgtttgatatgattttatctaatctttccattatttctccctttccaatatgtaatataaaaatcccatagaaaaataaaaatcttttcctatgggaatatgctctatgaattatagtagcctaaaacctttgaaacataatttcttgtctcacttggaagactacctatatttccattgcttctttgaaccgctcctggaccagcattataagcagcaacagcaagcttcatatcagagaaattatttaaaagctgctttaaatatttagttcctccatctatgttttgctgaacatcataagggttagttactccaagctctcgcgctgttgacggcataagctgcattaatccctcagctccaacccctgatgtagcattaggatcaaacccagactcctgctgtattacagacattataagttttttatccacaccatatttttttgatgcttcatcaacagcctgatctatagaaacatttcccgaactagtagcattttttacataacttgctacattttgtacatccttagctttaatagtgttcatgttataccctttattatacccaagtttgcttaaatcactactaccaccaaatatattatctaatccacttaagtcatattttccatcagctttttgcatagaattaataagaccctccatcataaactcaaagctactggaatttgttttactactatcacttcccgtcatacctgacgaagaactcttaaacatttgtgtcaataactgaagttcaagtaatctctgagcattttgtacattagaatcattacttatagacacaatatcacctctcaaataaattttaagctttaataattatcgtcctaattattaaaagactttaaacctctagttccattatatcataatcttcataagaagccatattaaattggcttttacaaagtgctaaaactttatattttccttcgttaaaaagcataaatgagtaaaaactttttctactgtatttttgcataagtttccattctccattttccattaagtaaaactcatacaaaacatctttccctccatcgcatttaaccttaaatgtaacagtttcattaagctcaggttttcccttatcacaaagtatttttgtatctgttattggcataacatcatgcacaaatacacttactatttttttatcatcataaacttcaatgctctttttattttttgcaagcacatcaatctcatattttccagtacactttgggataaacttgtattttttagattctatatatccagtatcctgaataactctcttatcaaccttaagtatatatctaatgaccatattttgagtgttttttaatatagtatctacttctatatcatttccaaccatgtaataattgttgttatttataagtacgtaatctatacatgctggcatataatcaaatacttctataaaaacttcttcatgagcatcatatttcttttccgaatacttgtccttaacatacgcatttattttatatgtacctggcacattaaatttaaattttgctgaacaaagatttccgtacgatatttcttgaacctttattccacttttctcaacatcgaacccatatcttaactcaaagccaccatctgcttttactttaagttttaaagcttcccccttaataatttctctatctccatcaactattatatcttttatctttacagctggccttcttatttcatctatcacaaagtttatttttttaatatcttcatatttttctttagaagattcatcttttaccataagcgttattatataatctccagctattttttctttccaattatatacactttcatacacatatccactatcttcaatatcttttccttctataatatacctatatacaagtctttttcccccacttgctaatgccttaagctgcacatcagtatctaaaagctgtggcgaacttaggtctgtagtaaaactttttattttaacatctctgtactttttaactgtatagcttattactgccctatcatcaaatttattttgagaatacatatctttaacaaaacataatattctaaactcaccataacctttttctatgtagcttaatatctttttagtagaatagtcttgaagacattttatatttccatccttgtccattttcatgaatttatataagatcatcctgttatcttcatgaacagcatcaacctcaagagtaatttcagaatcacaaaaaagctcatcattcaaacatttaaaatcccttatttgaaccttatttataaccttaacctcataactaacttcttttttagaatcgaattcattaattgagttactatttttacactctgccatcaaagtatattttcccggtgctgtagctgtccacgatatatcatttttgcaactgtaatcccttaaaatttttgtttcaaaatcattttttatacaatatctatatagtatattttctgatgttaccgcatccactctagcatttatcttttcccctacaactaggctttttttatctataataagtgcttttataatatttttatacttatctcctataacatagtcttctcttaaaacaaactcaaaaggtccattaatatcttttgatatctgaaccattatggtataaataccctcctttttaggtatccatgaaatttcattttcttttgaaaaatcttgaactattgaccactttccacgaaatccctcaataaacttatataaaaattctccctcggtatttccatgtacacatattcttatctcctgctctttgttttgtgggctttctttatcaaattcaatataaaaatcgctcataagatcatcccctgaatactaagtatattaattatgcatgtttaaaaatccaaattagagtatttgaattagaaacacatgccataaatcacaaattgttttatatatattatactacttttccaaaaaatgttatataattatttactttttacccataattttatattatataatgtatgaacttatacatttctaaaaatttttatggaggaacttatggtaattagcaatgcatttgttactcaatttaataaaatagaattccaaatcgacgattttactaattttcttttatcaaaaattactgttcgaaatactgatggtgaaattaaaataaacgaatatagactttataaaaataacgtatgtcttttgattgataatattgatataaaaaaaaattattatgtaagttatgataaagtaaccttaaagtgcagctattataaattattttctactacagaatttaataataaatatgcttataacggcaagcttggaatcacctatacaagagaaaaaacaaccttcagaatatggtctcctggtgcatctagtatagaactattactttataatcatgacattacttcaaacgaacctgcaacttctataaaaatgaaagaggacaatggtttatggtttttaatattaaaaggagatttcaaaaacttttattataattataaggttacaatttataattatacaaaagaagtagttgatccctatgcaaaagctgtaggaataaatgggctaaggggggcaatactagattcttatagcacgaatcccccaaattggaaaaaagatttcgtgccccaaagtatagaacatttcactgacgctataatatacgaaataagtattaacgatatttcactaaatcctaatagcggaattcttcacaaaggaaaatacttgggtctttgcgaagaaaactcaaaaaccataaataatattccaaccggaattaagtacttaaaatctctcggtataacccatgttcagataatgccaatattcgatttttcctataaaagtatagacgaaactaatcctattaactacaattggggttatgacccacaaaactacaatgtaccagaaggagcttactctacagatccctataacccaaggtcaagaatatacgagcttaaaactcttataaaaacattacatgaaaatgggatatgcgtaaacatggatgtggttttcaatcatctttggaatgaaaaagaaaataacttcgaaaaaatttttccagaatattatttaaggcgcaatgatgacaattccttttcaaatggaactggatgcggcaatgatactgcatcagagcactatatgtttcaaaaatttatattagattcaattaaatactgggtaaaagaatatcatatagatggttttagatttgatctcatgggaattcatgatattgaaaccatgaataaacttcgagacgaattaaacaaaataaacagtaatataatgttgtatggagaaggctgggatttaactactaatattgaaaagacaagaaaagcaattatattaaattcctcaaaaactcctgaaataggttattttaatgatgtaatacgcgatgccttaaagggaagtgtttttataccaaaagatactggatttatcagcgggaaatttaatctagaaaaaaccatactatacactacattaggctgttgcttagatgttaaagattataaaaaaattttttcttctccttctcagtctataaattatgtttcttgccatgataataacactttatacgataaactgtgtacttccaatccccatgacaatgatgatatacgtaaagaaaaaataaaattagctataggcattcttttaacttctcaaggaattccctttctccactgtggcgtagagtttgcaagaactaaatttggaataacaaatagttataactcagctaaagaaataaattggatagattgggatcttagagataaaaataaagacttggtaaattacgtaataagccttatagccttcagaaaaaatcattctgcttttagatttgtatatcctaatgatttaaaaaatcaccttgaaataacacaaaatatgcctaaaaactctataggatatattcttaagaatcatgcaaacaacgatgcatttaaagatataatggtaatatacaacgcaaacacacatgatattcaaataccgctagacagtacttggaatgtatgtattgataaatataatgctggaagcgaaaaaattagaactgcaagtaaattctatatcgctgaagcattaagtataaatgttctttttaagaatagtgaaaacagttttcttcacttattattataaaaatagggagcgtatagctccctattttttacgttactattttaatttattgttaagctctttagctaaatcttcataacctggttttcctaatagtgcaaacatgtttttcttataagcttcaactcctggttgattaaatggattaactcctaataaatatccacttattccacatgccttttcgaagaaataaaccatgtatccaaaataatatgctgtaagttctggaacatttacaaccattactggaactcctccatcatgatgtgctaaaacagttcccataaatgcctgcttattaacaaaatccatagtttttcctgctacgaagtttaatccatcaaggttttcagcatccttttgtattgtaacttctttcttaggattaactacattaatgaaggtttcaattaattgtcttcttccttcttgtatatattgtcccattgaatgcaaatctgttgaaaaatctcctgctgctgggaataatcctttaccatcttttccttcactttctccaaataattgcttccaccattctccgaaataatgaagtgatggttcaaaattaacaaccatttctatagatttacctttactataaagtgcatttctagctgcggcatattgataagcctcattcttttcaagatcaggttctgaatatacttctctagctttagctgcacctttcatcatttcatctatatctattccagcaactgctataggtaaaagtccaacagctgttaatactgaatatcttcccccaacatcatcaggtactacaaaagtttcatagccttcattatctgatagtgtttttaaagcacccttcttagcgtctgttgtggcaaatattctatttttagcttcttcttttccatatttcttttcaagtaattctttaaatattctaaatgcaatagcaggttcagttgttgttcctgactttgatattacattaactgcaatatcttttccttctattgcttcaagtagatcagctaggtaagttgaacttatattgttaccacagaaaaagatttcagggttctttctttcttctttagaaatacttgagctaaaggaatgtgaaaacatctctatagcagctcttgctcctaaatatgaaccacctattcctattacaataaatgcatccacactgtttcttatcttttctgctgatttttttattctttcaaattcatctttatcataattcacaggtagatcaacccatcctaaaaagtcattacctgcacctgttccattatgtatcgcctcatgagcagctgctaccgctggctttagattctttaattcttcatcttgaaggtatggttttgtatttttcaattctaacttaaaacactctgacataagctacaatcctccatatatttttattgatataggttctctacttcttcattaatttatacgtgtgttaaattataaacatgtacaaattggcttttattttatagacatcctatatttatttcctatagcaattttagactatataatgaaataaatcaagctattactccatagttaaagtaatttaaaattcttctcaaattaccaatgctggatttatacttatctagagacaaaaaaataattgattttttccttgttaaaagtttgacaaatagaacaaactgttatataatagattcataagatagatgttagataatttctataaaggaggtctttatttatggaaaaagtaataaatgtaaaaagcatgttaggtgataaattctcttgtcaggatgctgtagtactaaaataccacattttaaagagtaaaggtgacgatataactttagatttctcaggtttaggcgatgttccaacaacatttttttataacttattttcagaactgttatatagcaacaacagaaattatatattagatcatattaaagttaaaaatttagcaaatatgaaagattataatcgagtagtaaaaggtactactgtttcctcttaacctcttagccttctccctgctgtcttaatttaagacggccttttttattttttgtttttttaaatacatatttcactatcaaatacaaataatatttttgtattgtaatttaaaaagtaggaggttttaaaatgacaggcactcaaagtaaacaaatagaaagcaataatctcaaggtaatacaagatactatagttcttgaagctcttcttaataaaaaatgcagccaatattccagcatatgcagtgatccacaattaaaagctgtatttgatgaaggctgtcaaatgcacaaacaaaattttaattcactaaaagcttatttagattcacatcaataattatatatggaggtaagttattatgaatggtacattaactatgatgactgaaaaggatttaattgaagatattttatcttctgaaaaacaattaatatcatcttacagttcaggaattacagaatcttcttgtaaaaatttaagaaatgtattagtcaataatcttaaatgcagcgaagaaacacagtacagggcttttgatactatgaaacaaaaaggttggtaccctactaaggatgctcaagacaatgaagttcaaaaagtaaaagatgatgtttataatctatcaaagaatataaaataattttatttataaattgctgtagcaataacttactacagcaattttttattgcactttatctaaacattttatgtctacctattagaaaccgaggagatacagaattatcaagtataatatatgtaaatcggttaacaaaaacattgaattttgtacttatttaatatataatcaaactacaatgtggagtattttacagcttgttacatagagtaaagatattttacacaaatatagtaaacttattattaaaatatcacaaggagtgaacaatatgggtagaatagtaacattaggagaaattatgcttagactttcaccacaaggttataatagatttgttcaagctaagcagttcaatgcattttatggaggaagcgaagcaaatgttgcagtttcacttgctgttttcggtaaagatgttagctacacaactaagcttcccgacaacgctatagcacagtgtgcaataaatgaattaagaaagtacggagtaaacacaaaggatatagttcgtggtggcgacagaattggactttacttttgcgaaaatggagaatctcaaagacctgcaaaattagtttacgatagaaaagattctgcaatagctaaagctaaaagagaagacttcaattgggacaaaatatttgatggcgcagactggttccacttctcaggaataaccccagcactttcagatgaatgtgcaaaaatcacattggatgcggtaaaagctgctaaagcaaaaggcctaacagtaagtatagatttaaattatagagaaaacttatgggatgcagctgccttcagcaaagcaataagagaacttttacaatattgtgatgtagctcttggaagcatagaggaagctgaactggctattggagaaggtgacggtgatgattgtaacaccgtattaaagaagcttgtagaaaaattccagcttaaatacgctactattatattacgaaaccgatttacagccgaagatgtggattggactgctgtactatatgatggaagtaaattttataatgcaaagaaatatgacatccatgttgtagataacataggtggaggagacgcttttgcagcatcacttatatatgctataacctcaaatttttcaaatcaagaaattatagaatttgcaacagcaggttcatgtttaaaatacagtatgaatggcgatgttaacctttcaacagtagatgaaattataaaacttatgaatggtgacggttcagggaaagtaagtagataatcaccttatataaatttatggcagcaattatttttcataaaagctgcctttttccttatttatgaataacagtttttcctccttcaaggttatatgtcttacctttaattattatatttatagcgttttcgccttcatttttaacttcaataaaatttttatctactttcacctttattaacttctctctaaacattacattaaaagaaaaacctctccaattatctggcactataggatctaagaaaattaaatctttcctaatataaaaacccccaaaaccttgaaccactgccatccaagtgccagccatgcttgtaatatggcacccatcattagtatcattgttatagttatctaaatccaatctagctgtcctaagataaagctcatatgctttgtctatttttttcaatttgcaggctaaaatagaatgtatacaaggagaaagagatgattcatgcacagtcttaggttcataaaattcaaaatttcttcttattgtatctatatcatataaatgttgaaaaaagtatagaccttgaagtacatctgcctgctttataaaacaggatcttaaaattctatcccaagaccatttttgattaataggcaattcttctttaggtatatcttttaccgttagctgctccttatctaagtaaccatcttgctgcaaaaatatacccaagtttttatcaattggataatacatgttttctacaatatgcttccacttattcacttctttttctttaacctttaaagcactataacttttaaactcctctaatatttcaattgtatattccaaagtccacgccgcaattctatttgtgtaccaattattatttacgttattttcatattcatttggccccgttactcccaaaataacatatttattcttatcacaagaaaaattaactctctcctcccaaaatcttgatagctcaaccaacacctctataccatatctctttaaatattctttatctcctgtataatttacataattatatattgcataagctattgctccattcctatgaatttcctcaaaggtaatctcccattcattatggcactcctctccattcatggtaaccatgggataaagtgctcctttttttaaacctatctttttagcattttcctttgctttttcaagttgattatatctatacaacaaaagattacgtgcaacctcttttccttgtgttgctaaataaaaaggtagacaataagcttcagtatcccaataagtaccccctccatacttttctccagtaaagccttttggtccaatattaagccttgaatcttctccagtataggtttgattcaattgaaatatattataccttatagcctgctgagcctctaagtcatcctctattactatatcgcttttttcccacttatttatccaagctttggcctgttcataaagaaggctatcaaaacctttttttactgcactgtctaatatctcttttcccttatttataagttcttctattttaaaatctcttgaagtgacatttgaaacatatttgaaaagtgatacctcctcttcttctttaagccataacttaatcttgcttccaacaaatttctctttcgaagcctccttatatcttagtttgtgttttttactttcacttacaatataatatttcatacaagaacaaagataaaaatctagctttttagtttttattaaaagatgtgcttcattctttcttatcccttttgaaacttcactccaaaacttctccccataattagcatctgcatttcttacatctccatcaagatacggaaagaaacttatttcaccactaaaattgagaggtgttatggaatactttatagctccaatttctttacttactatacttacaaatcttttagtctcaagttttatcctttcaccatctttaaacgttgcaattacctgcctataaagatagccttccctcatattaagaactcttttaaaactctcaattttacatcttgaaatatcaaaacattttccattaacgtttaccttaataccaatccaattagtagaattaagcacctttgcaaaatactttggatacccatttttccaccacccaactctcgttctatcaggatagtatattccggccatataagtacctttaagagttaatccactataatcctcttcaaaatttcctctttgccccatatacccattgccaatactaaatatactctcacttatcttgtttttttcctccataaaattatcctcaacaatattccacgcgtccaccttaaaatactttttcaaataaattcaccaacttaaatctccgatcactttcattatattaatacagttatttttataaaagaattactattattataaattttctttttaacataagctctgcatatatatatattaatactatagggtcttgctataaagactgtacattaaacttcacctatatttaaggaggttaattatgccttggtttaaaaaagcaattttttatcacatctatcctcttggtttatgcggagcacctttaagtaatgacttcacttctaaaccaataccaagacttaaggagatagaaaactggataccttatttaaaatcattaggaataactgctttatatcttggacctgtttttgaatccacatctcatggttatgatacagcagattactatacagtagatagaagactcgggacaaatgacactttaaaaaaacttataaataagcttcataaaaatggcatcaaggtagttttagatggtgtattcaatcatgttggaaggaacttcccccaatttatggatttgattataaataagcaaacttccagctttgctacttggttttctggtgttgattttaacagtaaaagtccttataatgatgatttttcctacgatacctggaatggttgttatgatttagtcaaactaaactttaacaataatgaggtgaaaagttttattttaaatgcaataaacttttggataagtgaattcaagatagatggtatccgccttgatgctgctgactgcatagatataaactttctaagagaaatatccaacttctcaaaaagcatatcagatgatttcttccttttaggggaaattatatttggtgattatacacgctttgcaagtaaaaatatattggactctgttaccaactacgagtgttacaagggactctattcaagtcataattcattaaattactttgagatagcttactctttaaatagacaatttggcgatggcggtatatataaaaatattccattatacaattttgttgataatcatgatgttaaccgtattgccagcactttaattgatgcagctaatatttatcctatatatactattttgtttacaatacctggtatcccatcaatttattacggaagtgattttggtataactggtgtaaaacaaaataactctgataagtatttaagacctagactaaaaattaatgaattaaaaaactctaaagaaaacaaacctttgaataattttataaaaaagctttgccatattcgaataaattctgaagcattaacagaaggtttatacaaacaacttttcatttcaaataaactatttgcttttttaagatataccgatagtgaaaaaataatagtagctttaaattgttctaaagaatgttctcaaatagagttctcaaatgatatgaatgctacttctttatttgatcttatagagaaaaaaagcttaaagctagaacctaatggaactataagtataaccttacaggaaaaccaagcaagaatatttaaagtaagtttctaaactagtttatttattttaatttttgtttataattaaatatagagatcttagtttacctaataacttatttatgtatgaaaataattaaaatttcaatattttgaaatatacatgagttaagtttaacatatagggttcttaaagtatcctatatgtattttagttttaaggagcataatatggacaagaacatatttaatatattaaagaagtacttcggatattcatcttttagaagaggacaagaaaacataatacaaagtatattagatgggaatgacacctttgctattatgccaactggtggaggtaagtccatctgttatcaggtacctgcactttatatgaaaggactaacaattgttataactcctctaatttcccttatgaaggaccaggttgacaccttaagagaaaatggagttaatgcaagctatataaatagtaccttatcatctaaagaaacaaatgacatcttaatgtcagcactttcaggacatttaaaaattttgtatgtggcccctgaaagattagagcaggactattttagaaatgcaattaaagatttaactatatcaatggttgctatagacgaggctcattgtgtatctcaatggggtcatgattttagagttagttataaaagaattgtaccatttataaatatatttgataaaaggcctattgttgcagctttcactgctactgcaacagatgaggtaaagaaagatataataaatttacttgagcttaaagagccaaattgttttattactggttttgatagagataacttattcttctcaatagtaaaaaatgagaataaatttgattttataacaaaatatctttcaaaacacaaggaactttcaggaataatatatgctgcgactagaaaagaggttgattcccttcatcaaaagcttataagtcaaggatattctgtagggaaatatcatgctggcatgggtgataaggaaagaagcgaaagccaagacctttttctttatgatgaaacaaaattaatgatagccacaaatgcatttggaatgggtatagataaatcaaatgttcgttttgtaatacattataatatgccaaaaaacttagaatcttattatcaagaagccggtcgtgcaggtagagacggtgaaaaaagtgaatgtataatcctatttagtggtcaagatatacaaatacaaaaattcttaataaaacaaagtataccttcctttgatagacaaagaatagaattaaaaaagctaaatgatatgattaactactgcatgactacctcctgtcttagaaaatatattttaaactattttggagaaaactacgaagtagaaaactgtgataattgtataaattgtactggcaatgtagaaatagtagatataacattggaagctcaaaagattatttcctgcatttacagaatgggacaaaactttggcgtaactatgatcgccgaggttctaaaaggctctaaaaatagtaaggttttgagatttaactttgataaattatctacttatggaataatgaaagattgtacgctaaaacaaattactaatttaataaatacactcatagctgatggctatttgtacctttcagatagtgaatatgctacagtgaaaatgtctcaaaaaagcatagaagtgcttaagggatacaaaaaagtagtgcaaaaaatccatattgtagaagaactttcattaagtactgacaatactttatttgaaattttaaaggctttaagattagaaatagcgcgaagagaaaatgttcctccttacataattttttctgattctgtattaagcgaaatgtgtaaatattaccctaaggataagaattctatgcttcaaatcaaaggtgttggagaaataaaatacaacaaatacggcgaaatatttgaagagaagataagagaatacattaaagaaacaaatttaactccagaggataataataaaggaactcttaaagtgcccgaactcctttctaaaaagatacctacacatattgaaacttttaacttatacaaaaagggaattacaatagccgatatggctaaaataaggaatttatcaattccaacaatacaagaacatattttaaagtgcgcaaatgaaggtcttaatgtaaatttagatgcctacataccagctgaatacaaagatttaatatatgaaaaaataagaattcttggtacctctaaattaagacctataaaggatgcactgccagatgatgttgattacatggcaataaaagctgctatttgtaaatatacttctaaaaataaagcaatatagaaagataaaaataaagtctaggaagtaatgtttcctagacttcatttttatctttctataaatttcataagctcactgttaagcctatccttttcatcataaaataatccatgaccactttcttcaaatcttacaagcttggaattctttatgcctcttttctgtgcttcagctaaaggaaataaacatactttatcatgaattccatgaagaattagtgttggaactgttatctttttgaggtcagaaaacaactcttcctctccaagccaagtttttgctacttcagcagtagcccatcctgctgcctgaagtcctaaattaaaaaaccaatccgaaaaaggctcagttatatatttataaaaaaatgtatcaccaaattgccttaacattttaggtctatcctcatatgtgcctttaataatatcctccacagcatcttttgatagcccaaatggaaaataagagcgcttaataaggctaggagctgctgccgcaaaaagggctaacttattaactccatattgcttatgccttgccatatacctaattgcaatagctccacctgtagaatgtccagctaaagtaaaatttcttaaagaaagagtttctaccacacatctaacatcatctgatagtctgtcataattgtaacctgaatatggcttatccgattcaccaaatcctctttgatctatacctatgcacctatatcctcttttaggaagctgatcaaattgatattcaaataacttatggcttcctggccaaccgtgcaaaaacaaaattgttttatttgctcgcgggttaacatcctcaatataaagtttaacatcagattctactttaatataatatcccatttaacttacctctatattaaaatttcttcattaattagtttatccttgttatttaaatgtgtgaatttatatgtttaaaaaaatagtgcaggataatcaacttttaagttaaaaatcatacactatttttaaatctattattactttatgaaaataatttttctccattttctaagctatccccgcaaactcacacatattatattttttctttgggtaaaagcataaactcatcttttgcaaatctatgctgccttctttttgcttaaatctttattcttaatttgtcctattccatttctattagcataacttacaagctctggatcaagaaaaaatcctaacatcatcacactattctttaaaatatctaaactaaataattttttcatataattacctcctgctaacttttagtctttattgattaatttcccttacatgtttataatatacgattttagtttataaatcaaaatggaaatcgttttaacttatgaataagcagttaacatttttaaaataaaaagtaaatatttcagtaagttattgaaacattctatgaaaacgtatataatattttgttaaaaattaaacataattattataattttaataaatgcacttatttgtattttttcagaagaatattaccactttttcttataaatcataatatataattgacaacacttttaaggactatgctatgtattatatatttccctttcaaagagaaaataaatattcaagaacatctgctgtaaaatatgcacttacctacggattaacccctaacccaaattatagatattttcctttgataaatgataaaagtggagactgcgcaaattttatatctcagtgtttatttacaggaaatgcaccaatggatttcaataaagttcgcccttggtggtataaaaaagggttaaatagagcccttgatacttggtcaataagttggtcggtagctcactctttatactattatctaagagaaaatgctgaaaaaaattcttcctacacaaaaggtattgaaatcacaaataaaaaagaacttgaagtaggtgatctaatatttttccaagacaaaaaagggttaatatttcattcaaccattgtaacaaatttttctaatggtgaacctcttattacccaacattctcctcaagcagtaaatataccatatataaaatcctggcctgccttcaagtatcattacgtgaaaattcgtatttaaatttctttaacaaataaagtagtgcacataaaaaacatatgaggttactctatgcgcactatttttatactaatatttaataatatgcaaacagaagcatacaattttaaaccttctctttctatcatcaaatttactgcatctattgctctgcctctttaataatctgaagtactcttaataacgctggattattattttctttattccatacagcagcaatatcaacatagaaattattattctctactgctattatcataagattttgagattgacttaaatatcgtacgcagtaagaaggcattacggcaatccccatattagctgataccattaaaagagtaacttctatatcctgaccatcattatatttaaaaatagtctcccctcttaattcttcaaaccgtactgattttcttgctgctaaaggatgtgttggatgaaccacaacttttaaaggatatttatctattaatttcatctctaaagttttatcaatgtttttgggttttacactattaaatacaatatccaattcggagttcaataccttctcatatagttcactttctgttcctctaaaaaatgtaattgatatattaggatatttattgtatagctgaaaaatcaaatctgaaaaggcggttttttcatagccctttataaatccaatgcgtaatagtcccacaaagccaatagttgttaaatgtactctttctgttgcttcttcaactctaagtagaatagctttagcttccatcaagaacacattccctgctggtgttaactctacataatgtttatttctattaaataacttcgtgtctaaggtgttttctaataattttatctgttttgttacagctgtttgtgatataaagaacttttgagctgttttagtaaaactcaaggtttcagacaatgtaacaaagtattctaactgtctaagattcataaatatctctccattattttttgttataactttaagttattatagctaaaaaaaatgatattagcaacctattctattatttgctatgcttttaataaattaatagatattctagggggacattatgaagattttagcttttgaagtacgtgaagatgaaaaattatattttgaaaaatatgctgcacaatataactgtgagattacctgcatagaagatcctttgacatttaataatttaaaaattgtagaaggttatgatggtatatcaatcttgggtaaaagccacataacttgcgacttggaggacagccttaaatctttaaatgttaacttctgctctacacgaacagttggttttgatcacattgatataactcatgctcatgaaattggttttaaaatagcaaacactaattatccaccaacaggcgtagctgaacatactgtaatgcttatgttaatgtctttaaggcattataaacaagcaatgtggcgaggtcatgtaaatgattattctcttggcggtttacagggacgtgaacttaatacattaactgttggaatcgttggcacaggcaaaattggacaatgtgttataaagtatctatctaactttggttgtaaaatacttgcttatgatatgcatgaaaatactgatgttacaaaatacgctaaatatactgatttagatacaattataacttcctcagatattatttcattacatacacctttattagaaggtacatatcatcttattaatgatgaaaaaattaatcgtatgaaagataacgttgttttaataaactgcgctagaggcgaacttatggatattgatgctttaataagaggcgtagaggcaaaaaagattggagctttaggtctagatgttatagaaggagaaaaagacctatatcaccaagataaaagaactgatattattagtaatcaaaaaattgcatatcttcgtcaattcccaaatgtaatacttacacagcacatggctttttataccgatattgcagtagaaagtatggtaaaatgctcaattgaggcaattcacgattttataaaaactggtaactctaagactagcatataacttttggtattaagtgactaattaatatagaaaagtgcctataaaaaaatcttaaggcactttctataaattcacaaaacttattttgtaaatttattaaacagtataatcatcaacatcaaactcatagtttttataataatattttcggtcttcttctgtaatttcacgaataactttacacggatttccaactgctattacattatcaggaatatcctttgtaacaacacttcctgaaccaacaacaacattatcccctatatggaccccaggatttacaacaacatttccaccaagccaaacattatttcctatagttatactaataccatactcatatccagaattacgtgaagcaggatgtattggatgtcctgctgtatatagagatacatttggagcaaattgtacattgtcgcctatagtcacttttccaacatctaaaataatacagttgtagtttgcaaaaaaattatctccgatttcaatattttttccataatcacaatgaaacggtgcttcaatatgtgcacctacacctactttaccgaaaatatcctttattaactcatctattttttcactttcatctggtttgcaatgattatactcatatatcttctttttattatccattcgttcctctaataatccatctagccaagccttatacggaagacctgccagcattctttctttttgattcatagttacacctacctttcattttataagtattcataatataagttattttatcacatcttgtaaacattattgatttacttaaggatcaaacctcttttttatagaatttttctttcagcacattcttgaaaaaaatcaaaacaattcttctacatttactactattattgcacgatcaaaattatttataattttcatataatcatactttaaagtgtttaattagatttttatcgcttctccatagtttacatttatataatatttaatcattttagtatatctatacttgcaataatattaattaataacatatatttagctaaaattttatatttcctattaaagaatcaaataatagatatacaaaaaggcttggacataatccaaacctttttatactgtatataaaattttgtatttaatctactgagccttcagatacgtagtctgttgaaatataagcatacccagatccgaatggattttttattaagtaaaatccattttcaactgtattatctataatagtaacaacatcattattatccgcatacaaatatccatatacttcactatcagtatttgaatcagctcttacactcacttcattaccagttacataaccacattcagtgaattcataatcaattttgggttgtatgattttagctttagtcccaatagttttagcattggatgttattggcgatataaaagttgcagatgctaaaattcctgtaacaagtaatgtactaattaataatttttttttcattataattccttctttcataagtatttgtattaataataacgttattgctatatagtgtaaatagtgttttaaaatgtaatattttaatttaatttgccccattattgaaataatccattgatagatttaggtaagcaaaaaacagatgtcaatttgaatgattacgttgttgttactaccgatgataaaaagctcaaaaaaataacaacatacctacttcaatagatatgttgtcaaatgcattacatcaattaataattaaaacactacctcttgtaatacttttttctaagctcattctgatctttttttctattttcaacatcttgttttaaaatatataccttttttaatagaaactaactttccttgtctattcatatctgatatacgctgtttacttacttctaaatattcagcaacctcattagcatccatagtattatccttaattaattgtataagttcttctctctccattataattacctcttgaattttttattttctttatttcaactcaatcacatagttataaaattgaattaaatatacttaataataagaattacggttaactaaatatacctaaaataaatattataaataaaaaatatggtcaatagtagataacatcactattgatcacttacaaatccttatttcaagtcattttttattaaaatatttattcccactctgtcaacacaaacaagcacgtagtatcaaacattgatattacgtgttttcattatatctattatttaaaaaatattgtattttaaatgctttagaaaaatttcagtacgtttttagtacgctctataactactaattattaattaaaaccatagtgttagttttatctttgtcagtaattttcaacaaaaaacaaatcccgaccttcaccgtaatattaattgtcagatgatactgtactaattgactgtttagaactactcttataattcttaaggcaagttctacatttcaaattgcaaataaatacatttaaccaagctgcaattgacagaatattgagaattatagcatattaattgcaatgtaagcattttatatttattttccaaaggttgtactaattatcgctttataataaaaaacacttatatacatcattttacatttattccgataagttgtacactttatttgtattaaaaatacacttaatcaaatttaagggggatttaaaatgaaaaacttaaaattaaaagctttatctttaggaattgtttctactgtcttaatttcttctagtgcttttgctgccactaataccaaaactaacgtaacaaaacctactattaattcaactgtacaagcatctgttaaaccttcaaaaacatatggcgaaataggtgatatagctacaccaaatcaatatggtggatgggattttggatcacagaacatgcctacccttttaagtgaaggagtaacagttaaggaatgggatagtggattagctgttaaggaaattcaaactgctctatattactatttccttaaaaatgacagtaatgtttttcattcttacaatatgggggacccaaactttataaacggaatttttggatattcaacatatgctcttattgtagaatatcaagtaagaactggcttaagtgatggtattgctggcgcagttggtgctgtaacttgggcttctctaagagtatgggatttataatatatctataagcaaattatcgtttaaaaccatatattattcctcaaataaaatatatccttatagtagtagaatctactctagggatatatttttacatattgttattttttagttatttcattttttaattcttctttggaagtatctttaaatagacaccaaaataagctggtatgttacatttatatgattatttatatagcattaagcttgtacatatatttaatttacataaattcagataataatattaaataggaagtgaattaaatgaatcaaaataaaactactttaagactaataaaaataattgaaacactagtaataattatcttgttgctagtttatacaaatctatagtatttattattaaatgagcagcccaactgttctttttttatttataactttatctttcaaattaacttttattttcttattatttatcgattataactttatattataaacctaagtacagtttattatacagatattgttttacttattaatatataaacatatactagaatccttttattttatttttgtatttttaaaacgcataggaatagtaacgttttagatatattggacttatatttttgtatatctttaaatttaattttcgattctattttatagcaatatagctattatactgttcttaagctttataaaaaattaaaattatattataaattgattcaaagttcttttattttataacttttactcgctaaagtatagtactgcatttggggatttaagaggtttttacaatataaaatactgtttttagagtataaagcgcatttaattatgtgaaaatgttttatttattactgtaggaatggatgttaaagcttttaatgactaaaagccacgaaaactaattctcagcttttttatttatcttataacaacattaacaattcttctaattcatcattttttattattggaatcacttttcttcaattggtctgctaataaactttctaattccttatttgcttcattgtttttctttatctttaatttttctattcttatactatcaacaataacttttaaatcctgaattgtaataaataaaaaatataatgttattaacaataatgataattccaatgaataaaatgattttataacagttgtattacttacatacttttcaataatggttagattgactatagatatgcatattgatcccaaactaaacaatattcccttttgtatgttgtcatatacttttttcaatgcgttagcttcttcaaataactgtactatactttcatttagaaatcccattaatattgataaagaagtgaacaaaaatcctataaatacagaatttacagttataagattaaaatgattacttttaacgaaatcaattttaagtagtattgacataatttcgttagcagttaaaatcaatataaattttcctatttttttcacaacttcactttcttttaactactctatatatttttttatatcttctatgttcttatcatatactattttcattttatcataaatctgttcagccatttcatttaatgaaaattttatagtttctccttcatctactctggatgtattaactgaaatagcataagtaacttcctcattagtaaacttgtaatttttattatctgtttctgctgttttacctctaaaaaacaatgtatcttttatatctttgttacattctttaaatgcatctatttcatatccaattttttgaacattttttgttaatggtattcttggtttgttttttatattaacttgaatttcgaatacattcaattcctctaaagcagaaatttgctttgtgtctaatcctaaataacgtaatacattagcatttggtatattataattataacctatattgcttaattttacgccacctttttttaatgcctcaatcattttctctgttagaattttattatattcaattaccacattcttatttttaagttctataggcaacaaacgatttactatttttacaaaagaattcactgccggagcgaactgaccaaacaattccattataatactttcagtagtatctattaaaatgtatgtacatatttctaaattatacttttgttgctgatctttatctaatacttcttcgcttactaaagtacccttatcacgttttaaggcaccttcaatttctttttttctgcctaatctaaaaaacatataattattaggaattacttttctgtttatattctttaataattcgatagaatatgtatcatcactatcttcaaatacacgaactttattgctgttttctaatacatttacatctttatcatccttatttaaaatcaaatctactatttcaaataagaaatcctttttacaaatattttttcctttacgcacattataagtgtaacaacgtatttgtttatttgccattctatttcctccattatgatattagtatttcattaaatatgtgctataatagagttatatttaatgaaatacgtttgattcgagaagccacttctgattgactgtcatagtggcttctttctattattgtaaaactttttgcaaaaataataagtatttacaaaaaaaataaaatagttcctagaatgatatttcactaataagctactacatttattattttacagtgcttaacactgtattcaagttaactccgaattcttatttgctaactctgtattgctgtcctgtaactgtgccttttcttctgtaagttgatttatttgagtttgtaaagtgttttgctccttgcccttcttctctatttcagatttagaactaactataatttgttctatttatgcatctataagagtatctatttcagtagtttcctttattccaacaagctttaaacctgcttgtattatttctttagcttttatcttacgttgatccgctgtaagttgagaatatatacaaagttattctactgcttttactgatttttctgcaagagtatctataatatctaattttgcaaaaataggattaggcaatatggattgtcctgcttttattatacattttacaaaacatttcttatctcatgaaatgagaagggtatgcaaaaaaaagcagtgtaaaacaaattcgaatacatgatctaagacactctcacgcatctttattaatcgaacttagtttcacaccacttctcatatctgaaaggttaggacatgaaaaagtacaaactacgctcgatacttattcacatctctatcctaacaaaggcaacactgtcgcaaataaacttgataatttatattagtacgtttttagtacgtttttaatttttctatcatgtataattaattaatggcaatacttgtaggcatttttattaattattcccactcaattgtagctggtggcttactagttacatcataaactattctgttaacacctttaacctcatttactattcttcttgaaactttatctaaaacctcatatggtattctcgcccaatcagaagtcatagcatctgaagaagttacagctcttaaagctatagtttcgcagtaagttcttccatcacccataactccaacagaatgaatgtttggaagacatgcaaagtactgccatatcttttcttcaagtcctgcatttgcaatttcttctctaaaaatagcatctgcttctcttacaatttcaagcttttcttcagttacttctccaagaactcttattccaagacctggtcctgggaatggttgacgccatacaagcttatgaggaattcctagttcctctcctaccgctcttacttcatctttaaaaagctctcttaatggctctataagttcaaactgcatatcctctggaagtccaccaacattatgatggctctttatagttgcagaagtatctgttccactttcaacaacatctggataaattgttccttgaactaggaaatctatttgtccaagtttatttgcttcttcttcaaaaactcttatgaactcttctcctattatttttctctttctttctggatcagaaattccttttagttttccaagaaatctatccttagcattaactcttataagattcatatcaaattgttttctaaaaatactttcaacctggtcaccttcatcttttctaagaagaccgtggtcaacaaatacacaagtaagctgtttaccaatcgctttatgaactaaaactgctgcaacagatgaatctactccacccgataaagcacataaaacttttttatctcctacaatatctttaatctcctgaattttctctttagcaaaagaagacattgaccaatcctcttttaaaccacatatcttaaataagaaatttgaaaaaagctgctctccaaaaggagtatgtaaaacttctggatggaactgaactccatatatcttcttctctgtgtttgccattgcagccactggacaaacattagtatgaccaaccaccttaaagccctctggaacttttgcaactctatctgtatgactcatccaacaagaattctctatatctattccttcaaataattcacaaacactatctagcgttacatcagtctttccatattctcttatttctgaacccataacttctccacctaaagtataagttataagctgatgaccatagcatattccaagaacaggaactccaagatcaaaaatttctttatccatcctaggtgaatcttctccatacacactgttttgtccaccagtaaatattactgcactaggcttcttttcctttattttatctatagaatatgtgtatggaactatttcacaatatacattgtgttctcttactcttcttgctataagctggttatattgtccaccaaaatcaataactaaaactaactgtttatccatcttttcctcctatttatggggaactcatctctactaattccctacaagcattattatattattattgtaaccttactaagttaatatacactaaaaactaacaaagtttagaatgaaaaccctattagtttttagcagaattttttattgatttacactgtagttaggtgcctctttagttattgaaatatcatgtggatgactttctcttaagcccgctgatgtttgaactacgaaagttgctttttcaaataactctgtcatatttcttgaccctaagtatcccattcctgaacgaattcctccaagtatttggaatactgtttcaattacagaacccttaaatggaactcttccttcaacaccttctggaacaagcttcttgtttccttcttggaagtatctatccttacttccacactgcatagctgctaaagaacccattcctctatatactttatagcttctaccttgatatatttcagtttcacctggagcttcttcacaacctgcaaacatagaacccatcataactgcttttgctcctgcagctagagccttaactatatctcctgagtattttattccaccgtctgctattataggaactccgtatttattagcttcttctacacaatccataacagcagtaagctgtggaactccaattccagcaacaactcttgtagtacaaattgaaccaggtcctataccaacctttacacaatctgctccagcttctattaagtcatgaaccgcagctgctgtagcaacatttccagctataacttgaagttctggataagctttttttatagtttttacagcctctaaaactccttgtgaatgtccatgtgctgtatctaaaactattacatctaccgatgcatctacaagagccttaactctatccatcatatcttttgttactccaacacctgctccacaaagtaatcttccttgtgaatcctttgctgcattaggaaactttcttattttttctatatctttaattgtaattaatcctttaagtacaaaattttcatctactaaaggaagcttttctatcttgtgctttttcaaaagattttttgcttcatctatagtagttccttgtggtgctgttacaagattttctgtagtcattagctcttctattttttttgaataatcagtttcgaaaacaatatctctgtttgtaattatacctattagttttcctgcattatctgttattggtacacctgatattctatatcttttcattaaatcaagtgcttcttgaactgaattgtcttttgaaagggatataggatttgttataactccattttcttgcctttttactctatcaacttcgcttgcttgttctgctattgtcatatttttgtgaattattccaattccgccttctcttgccatagcaattgccattttggattcagtaactgtatccattcctgcgctcattaggggtatattaagctttattttttttgttaaatttgtggaaagatcaacctcttttggtaatacctctgatttatttgggacaagtaaaacatcatcaaatgtgtaagcttgttttagaatttttgccatttgtaaaacttcctttcaaaaatatttataactaatatagtcactttagggtaaatatacagaattttatgaaaccttttatttagaacataagcacaccaattttcagagtgaaaatcagcatgcttttgcatacaaacaaatcactcatagtaagaaatttaaggttccttgtagaaacatcctgccatattcaggaaatatatgagttaaactatattaacgattattttaacttctattttatttaaaaaaatgcattttgtcaatcatttttgtgggttgtttgattaaaaactttcttaaatgatagaaatatgtaatactctttaacctatttttaaccatttactaactttaggagaataataatataataaaatcaaattattgcactatgtatgcactcaatttatatctatattcttattatatagcaataatatattaatattggagatgtaaaaatggatatattatgtgaaatagaaaaaattcttaaaaacatgaatataactaccttatttcagcctataatttctttatcagattgtagaatattagggtacgaagctctaagtagaggccctatagactctcctctttatttacctagcgatcttttcagtgctgcaaaaaagtataataaaacttgggaacttgagcttgcatgtagagtaactgcaataaaaaattctaaaacactaagtccagataaatttctttttataaatgttgatcctgaaataatcaaaagccaaaactttcaaacaagctttagcaaagaatatctagctaaatataatatatcacctaaaaacataatatttgaaataactgaaagaactgcaatctcagactataaggccttttcaaagatattaaagaactatactagccaaggatacaaaatagcactagatgacacaggttctggatattcaggcttgcaaactatatctgaaaccaaacctcattatataaagcttgatatagaacttatacacaacatagatagaaataactttaagaaacttcttgtaaaatcttttgtagacttttcaaaagctgctaagctaaagttaatagcagaaggaattgaaacagagggtgaattaaaagtattaatagatttgggcgtttatgctggacagggcttcttcatttcaaaacctaaccatgacttttgtgaaatacctgaatctgttaaaaaaatcatcataacctataataaactaaaaaaagattattttaattttcgcaaatataaaattgggactattgcagaaaattattcatcttttgacagaaaagtttcatgttctgatttgaaaaattattttaacaaaacctcctttactggtgcctgtattgttgaaaactcttcacccgtaggccttgttatgaagcatactcttgattcagtccttgcaacacaatacggcgtagctatattttccaaacgccctgtagagcttgtaatggacaagaatgccctcgttgtagattataatacaagtataaacagtgctgctaaaatggcaatgcaaagagatactgataaaatatatgattatgttatagttactaaaaacaacacgtattacggtatagttacaattaaaaatcttcttgaatttacagtaactatagaaaaaaactatgctaaagaattaaatccacttacagggcttcctggaaacatccttatagaaaagaccttatcagatattttaaattcaaacgagtctttctgtgtactctatctagatcttgataactttaaaatttacaatgatgtttatggctttgaaaatggagataaaatattaaaattcactgcaaatacaataaaggactgccttttagaactgtttacttttaaaaattttgtaggtcatataggtggtgatgattttatttgtattataaaagcctctctagaagaatgttacaaagtaagtcaacttataattgatagatttgacagtggtattcttaaattttttaatgaaatagacagtaaaaataaatacatagtgggcttagacagaaaaggagttgaggacaaatttaatctaacttccatttccattgccggtgtttatggcaacatagcagaatttaataccagtgttaatcttgcactatatgtaagtaagctaaagaagaaaagtaagctgcaaagacatagtagctatattattgaagagataaaaaactaatactatgttttaaaatgcactcttattacattaatctttgtacttttttaaatataaaaataaaggactaaattctgtttgttccaggatttagtcctttatttatcttagctttaatctcttattagtacattccgcccattcccattcctggtgctccacctggcatttcaggtttatctttttcaggaatatctgctacagcgcactcagttgtaaggaatgttgaagcaactgatgccgcattttgaagtgctgatcttgtaaccttagttggatcaacaattccaacacttagcatatcaacatatttctcatgtaatgcatcaaatccaattcctttttcactgtttataattttttctattattactgatccctcaagacctgcatttgcagctatttgtcttactggttcttcaagagccttaactattatatttataccaacttgaacatctggttcgtctgaagtcaattctcttacttctggtaatacattgatgtaagcagtaccaccaccagcaattataccttcttcaactgctgcttttgtagctgcaagagcatcttcaattctcatttttctctcttttaattcagtttctgaagcagctccaactttaacaactgcaactccaccagcaagttttgctaatctttcttgtaatttttctctatcaaagtcagatgtagtttcttctatttgacctcttatttgcgcaactctgtcatggattgcgctcttgtcgcctcttccatttactattgtagtattttcttttgatattttaacgctttcagcacttccaagatcctcaacctttacatctttaagatcttttccaagctcttctgatataacttctccacctgtaaggattgctatgtctcttaacatatcttttcttctatcgccaaatccaggagctttaacagcaacacagttaaatgttcctcttaatttgttaacaaccaatgtagctaaagcttcgccttcaacatcatcagcaattataagtaattttttaccctgttgaactatctgctcaagaagtggaagaatttcttgtatatttgcaattttcttgtctgttattaatatatatggatcatcaagtacagcttccattttctcttgatctgttaccatgtatgggcttaaatatcctctatcaaattgcataccttcaacaacatcaagttctgttcccattgattttgattcttcaacagttataactccttcgttgcctactttctccatagcatcagctattaattttcctatttcaggatctgctgctgaaattgatgcaactcttgctatatcttcttttccgttaacattctttgatactttcttaagtccttcaacagtcttatctacagctaatcttattccatttcttataagcattggattagctccagctgtaacatttttaagtccttctcttattattgcttgtgcaagaagtgttgctgtagtagttccgtctcctgctacatcattagtcttagttgcaacttccttaacaagttgtgcacccatattttcatatggatcttcaagttctatttcttttgctatacttacaccatcatttgttataagtggtgctccaaattttttatctaaaacaacatttcttccttttggtccaagagtaaccttaacagtatcagcaagtttgtctacgcccttttgcatagatcttcttgcttcttctccgtataatatttgctttgccatttagaatccctccctgaattattaacaaaattgatagcttattcttctacaattcctaaaatatcgtcctgtcttaaaattaacaattcttcattgtcaacttttatttctgttccactgtatttggagaaaaatactttatctcctgtctttacttgcatttgaatttctttgccatctacaactccaccaggacctactgcaacaacttctgccatttgaggtttctctttagctgagctaggtaatactataccgctcttagtagtctcctctgcctctaatcttttaataacaactctgtcaccaagtggtctaattttcatttttaaacccctccttaaaaaatatgttaatttttttattatattaatttacttttagtataaacttaattttggcttgttagcactcgttaatcttgagtgctaacacaattattataataaataatcctgaatatattagcaaacatcaattttacctaaaagtcctgaattttctagatatattctaattataaataaatactttaattttttatggtttttctcgctttttcatatatagctatttgtgtataatatttattgtataggaaatactcattaaataaatttacagtattaatttcttattgtgaggattgatgaaatgttaaaattatcgaactttttacaagtgttgctatccattttagtttttatatttatattttttattatagtaaaattcactgtagcctttaaatacctctattactatgatataaaagctctaagtataacatcaaatttcaataatactatagaaagctattcaggcaaaaaaatcgttttaaacgataaacaagttaaagaagattatagttatatgatatcttacataaatggaaacaccaaaaaaaagacctttgacctaccaaacttaccatcttcagaacatggtaaaattcactttatggacgtagaaaaaattataaaaaaaattaacatggtagctttttctatatctttacctatgttaattggaattatactctgctttattaagagaaaaaaactgtatttaaagattacttctattttactgtttgtcactccagttattataggcgtattatctttaaatggtttttctgatatttttataaagtttcataaattattttttaacaataattactggctttttgatccagcatatgatcctataatactacttcttccagaagaatttttctttcactgctttatattaatacttttactctgctttatatgtggaggtatactaatgaaattatataggtcaaagaaattaaattaacaaatttatttctgctttttagaccttatacttgatatttttgttagtaaatatttacccttaaacactcctaaaccaaataaaacaactgaaataaccgcaattatcaccatcatctttatattaccatgtgttattgtattgccaaaataagctgaaataaatatgccaggaaaccttcctattgtggaataaattataaaatcctttaggcttaaatcagttatgccgcatacatatgcaagaatatccttaggaagacctggcactaaatatatgagcgttattacatatttaatctcgccattcttgattaatttttcaaagaaacttatattttgttttcctgatattttttttacaaaaggtcttcctaatttatttgaaagatagaatgccactgcacttcctgctgttattcctagaagagagataactgttccccaaaatgttccaaatatatacccccctgcaatttgaattatttctccaggtataaaaaaagcaaccacttgaagcatctgcataacaaaaaatgcaaagaaaccaaacttgccataggataatatgaactcttttactctttgagggcttcttaacacataaaagtaccttgaataatatatatatccagtaactatcaaaaatattagtaatattatagcagctattttaagtttacaattcttaattttattatatagatttcttatcaagtcaaaaacctccacatctaaaatcttaagcttatagctgtatattattctctcttgcataataaaacaaatattgctgagcaaagccagataagcttccaaacttctctcttccaaaatctcttatcttctttaatgaaacgtctggtgctacgtaaagactcatcattgcctttttaacccaagtatctacaggaaatgctgaatatttctgcatagaaaaaagcattatacaatcagctaccttaggacctactcccataaactttttaagctcttcgtggcattcattgtcatttaagctttttatgtactcaagatttaactcaccattatatatcctatctacagtgtcctttagatatttagccctaaatccagctgtacactcctcaaaatccttctctgtaaattcatgaagcttatctactgtaggaaatgcatagtaaatcttacccttgtattctagtttcttgcctgctttttcacttatattatttatacatttttttatcataggtattctattgtttgctgaaattataaaagataataaaatctcaaaaggatcctgccttaaaattcttattccttcgccaaagtcaactgatttttttaaaagaggatctctactgagctctttctttatttcaccatagtccctatataaatcaaaatattcactccatacattcttaaattcttcttcattgatattatatattacaacatcttctcctattttttgcacttcaactactttttcaaaggcaataccaatatagttaccattctcttgtctatgccatctaaagcattgaccacagtcaaatatatccttaagctcaaaattttctacatttcttactataacactatccttcttttcttctatcatatcaaaatccatattataatccctcctctaaaattatattatatataaaaaatccccatttgataatggggattcttgtaaacttattttgaataatcgtagaaaccttttcctgattttcttccaagccatcctgctcttacatacttcttaagtaatgtatgtggtctatacttagaatctccagtttctgagtataaaacatccattatagcaagacatatatcaagacctataaaatcacctaattctaatggtcccattgggtgattagctccaagtttcatagctttatctatgtcttctactgaagctattccttctgctaatataccaactgcttcattaatcattggtattaatattctatttacaacaaatcctggtgcttctgctacttctacaggatcttttcctattgctatagatgtctctttaactgcatcaaaagtttcttgtgatgtagctattcctcttattacctctacaagcttcataacaggagctggattaaagaaatgcatacctataaccttatcaggtcttttagttgctgatgccacttctgttattgaaagtgatgatgtatttgatgcaagaattgtttctggcttgcatatattgtctaagtcagcaaaaatctgctttttaatatccattctttcaacagctgcttctataactaaatcgcaatcagctgccatattaaggtcaactgttccggaaattctagttaagatttcaactttagtagcttcttctatctttccttttttaactaatttagaaagatttttattgataaaatctaatcctctatcaacaaattcatctttaatatctcttaatactacttcaaatcctttagctgcaaatgcctgagcaattcctgaacccatagtacctgcacctataacacatacctttttcattaaacagacctccctaaatttaaagaaactatcaatgcatttacaccaaaatactatataagtattttggcataataagctttaaataattctttttatttatcttaattattagcagctttaacttgagctattaattctggtacaactttatttacatcaccaactatagccaaatctgctaccttcattattggggcttctacatctttatttatagcaattatgtaatctgaatcttgcatacctgctaaatgctggatagctcctgatataccacatgcaatataaagagttggtcttacagttttaccagtttgacctacttgaaggtccttatcaacccattctttttctattgctgctcttgaagcggctattgttccaccaagtaaacttgctaactcttcaagtttttcaaagttttctttgcttccaactcctctaccaccagcaactaataccttagcttctccgatatctgcaatatctttagcaagcttaacaacttttgaaacttttgttcttatgtctgatgctgttaatttaattgcaactttttctattttatcatcagaaacatttgcatcattaacaggtaatttttcaaacacaccaggtcttactgtagccatttgtggtctgtggtctgaacaaactattgtagctatcaaatttccaccaaacgctggtcttgtagccaataaatctctattttctacatctatgtcaagtgatgtacaatcagcagttaaaccagtagaaagtcttgctgctattcttggtcctaaatctcttcctatgaaagtagctcctatgaataatatttctggctttctttcattaactaaatcacatataactttagcatatccatctgttgaaaaatgtgctaaaagttcattatctgctgctaaaaccttatctgctccatgagataataaatcctttgacattttttcagtattatgtccaagtaaaacagctgttaattcaacgcctaatttctcagccatttccttacctttacctaataattccaatgataccttttgtaattctccgtctctttgttcagcaaacacccatacgcccttgtaatctgctttattcattgaaaaatccctcctaacttaaatatagtgttcttcttttaattttgagacaacatatgcagctgcttccttaacaggcttatcaataacttctccctgtcctttaacttctttagttgatgacttcttaactttagttggtgaacctttaagacctaaattagccttatctacatctatatcatcggcagtccacatttttacttctttatcaaatgctccgaatattttttctacactcatatatcttggaacatttaattctttaattgctgttaaaagaactggtgtcttaacttcaacaacttcatatccatcttcccaagcttttctaatctttaaagtatctccatcaacttcaactttctcaacataagttacttgaggtattccaagatgctcagctatttctggtccaacctgagctgtatctccatctatagcctgccttccagcaaaaactatatcatattttagcttcttaattcctgctgcaattgtatgtgaagtcgcaagtgtatctgctcctccaaatgctctatctgttaaaagtacagcttcatcagcacccatagccaaagcttctactaaagcatttttagcttgtggaggtcccatacttataactgttacatgtgcaccataattatcttttaatactaaagcttcctcaagtgcgtttttatcatctggatttattattgatggaactccttctcttataagtgttcccttaactggatctattctaacttccgctgtatctggaacttgttttaaacaaacaactatattcatcctcttaacctccttaaattatctaaaaatttttcctgaaataactaatttctgaacttctgaagttccttcatatatttcagttatcttagcatctctcatcattctttcaactggataatcttttgtatatccgtatccaccaaataattgtactgccttagttgttacatccattgctacatttgcagcatgaagcttagctcttgcagcatcaactgtgtatggaagtcctgcttgtttaagatatgctgctttatatactaaatatctagctgattctatagctacatccatatctgccatcatccatgcaagaccttggaatttgtcaaggcttcttccaaattgttttctctccttcatgtaagctcttgcttcgttgaaagcaccttcagctatacctaaagcttgagctgctataccaattcttcctccatcaagagttttcattgctatagggaagccttttccttctttaccaatcatgttttctactggtactatcatatcttcaaatacaagttcagttgttgatgaagctcttattccaagcttttgttcaactttaccaatagagaaacctttgaagcctttttctattataaatgctgatataccttttgttcctttagttctgtcagtcattgcaaatataacaaaagtatctgcaactcctccattagttatgaatatttttgaaccattaattacataatgatctccttcaagtacagctactgtttgttgtgctccagaatctgttcctgcatttggctcagtcaatccataagcacctattttttcacctttagctaaaggtactaaatatttttgtttttgttcttctgtaccatgttcatttattaatgaagcacaaagtgatgtatgtgctgaaagaataactcctgtagtaccgcaaacctttgataattcctcaacggcgattatataagataatacatctccacctgcgccaccatactcttttgaaaatggaattcccatcataccatactgacccattttctttacattttccattggaaatctttctgtttcatcaatttctgctgctataggtttaacttcattttcagcaaattctctaaccatctgtcttactaattcttgttctcttgttaaattaaaatccatataaacttacctcctatctatttttgaagccttcaatttttcttttctctatgaaagctgtcattgcatccttttgatcctctgttgaaaagcattctccaaatgcttctgattcaaatgctaaagcagtatcaatatcacactgcattcctctattaatagcctgtttgcttaacttaacagctactggagcattgctcacaattttgtttgcaatttcttttgctgtattcattaattcactaggttctactaccttatttacaagtccgattcttaatgcttcatctgcctttatattttgtgcagtaaatataagctgctttgccatgcccattccaactaatcttgaaagtctttgtgtaccaccaaaaccaggtgttattccgagacctacttctggttgaccaaatcttgcgttgcttgaagctattcttatatcacaagacatagctatttcgcatccgcctcctaaagcaaaaccattaacagctgctattacaggcttttcaagaagttctaatcttctaaacactttatttccaagtatcccgaattttctaccttcaatggtattcatttccttcatctcagaaatatctgctcctgctacaaatgatttttctcctgctccagttaaaattactgcaagtacttcgctatcattttcaatttcacctataacataatccatttcttttagtgtatcactatttaacgcatttaatgctttaggtctgttaatggtaactacagcaactttaccttccttttcaaggatgacattgtttagttccatgactaatcctcctaaaatatttttttattgttaatattataacaaagacgggcaaaaaattagaagcatatgcttctataattattatataatgatttattttatatttcaatattaaaaccattttatattaaattttaataatttttatatatatttaaataacattaccgtactaatctcggcttttattcacttcttgcaataaacagctaagtgttagaaggctttcacttaaatgtacattttcaacaattacattttctggagtcataagatcaacaggagcaaaattccatattccattaacattatttttaacaataatatcacaaactttttgtgcattcttacttggaacacatattattccaatatcgatcttatttttttgtaagaatccatctatattatctacgtcccgaacctcaacatcctgtattttaagacctattagcttaggattaatatcaaatatagcctttaaatcaaatcccattttttggaagtttatataattagcaattgcctgacctatatttccagcaccaattattatggtgttgtacattttagtaagtcctaatatattatcaacttccctgcttaaatccttaacattgtatccatatccctgctgtccaaaatcaccaaaacaatttaggtcttggcgtatctgcgatgcagtaaatcctattttttcgcttaattcctttgaagatattctatcaacatcactctttaacaattcttctaaatatctgtggtatttgggaagacgtctgataactgccattgatatgttttttttcttatccactttgaccacctcttacttaatatcacttttgtagaagccaagttcaaattaagttggtatattaaataattaaaatacatttataatccataattaacttgtttcttcatatacaacaatacatcatatattttaccacattattattcaattacactatcctttttactttatattattcttaaatacttttgttagtatagaatattttcaatatagttcttttttttcaataaaactttaaaaagctaccataaatagagtttattctgtgaaaaacttaacttatacacattaaatgcttttaatcatattattttattgtttatagttttatatcaaattagtttataaactttcttcttttaatattatatcttttctttaatacactatacagcccttaaactcaactatattttctatactataccttaaaaattagctttaaccttagttttcctatggtataattaaagatatcttataatctttactaatggaaactttaaataaaccttacttagtttccttacaaaatattttaggttggtgatactcatgatagttgttagctgcaaaaatataggcaaaagctacggcattgataaaattttggaaaatataacatttagtataaatgatggtgaaaaagtaggccttataggtccaaatggtgctggaaaatcaacattgtttaaaattttaactttccaactagaacatgacactggtgatttatttatagataaaaccaaaaaactaggatacttatctcagcacttagatcttgatagtaacaatactatatacgaagaactttgtactgtcttcaatgatcttttagaaattgagaataaacttaaggttttagaaataaaaatgggagagccttatgacccctcaaaggatgaatatcataacaaggttataaaggactacaccacttacacagaactttattctgctaaaggtggctacacttataaaggtttaataggtagggttttaactggtctaggattctcaaatgattactttgataaaaaaataagcatattaagtggagggcaaaaaacccgtgtagcactttgtaagcttcttcttaaaaaccccgaaatacttcttctagacgagccaacaaaccatcttgatttagatgccattgaatggcttgaagaatatcttaaaaactacaagggaacagttattttaatttctcatgatagatatttcctagatgctattactaataaaacctttgagcttataaacggtcatgtaaattgttttaacggaaattacacaaaagctttagatttaaaaaagaagcaatatgaaattgaacttaaagcgtatactcttcaacaagaagatattaaacgacaagaaaaaattatagaacgttttagatcctttaatcgtgaaaaaagtattaaagctgctgaaagtagacaaaaggctttagacaaaattgagagagtaaaacgtcctgataaagaaacaggagtaacccgtatagaatttgaaactctaataaagagtggaaatgacgttcttcatgttgaaaatctttcaaagcattttgaagataaaacactgtttgaaaatttggacatggacataaaaaagggagaaaaaattgctttaataggcgaaaatggacgtggtaaaactacatttttcaaaattcttctagataaaataaaaagcgattcaggcatcaaggttctaggaaaaaatgtattcgtaggctactatgatcaggaacaatctgatttacatgatgaaaaaacaattatagatgaagtctgggatgattttccagagcttactacaacagaaataagaaatgctttggctgccttcttatttacaggagatgatgtgtttaaaattatctcaactctaagtggtggagaaaaatgtagaattaatcttcttaagttaatgctttcaaaaaataactttctacttcttgacgaacctacaaatcacttagatatagtttctcgtgaggctcttgaagatgctcttttatcctatgacggaactgtacttgtaatatcccatgatagatactttttaaacaaagtggtctctaaaatattagaattaaaagagaatggtataagcgaataccttggaaactattcttattacatagaaaaaaagaataacccaacaagatttcaagaggaagaagaaaataaaagcttaaaaacaaaaacacaaattaacactgaaaagaagaagaagagagagaatgaaaaacaaaaaagagttagaaaagtcgaactgaaaaatacagaaaaagaaattgctgatttagaaaaagaacttgaagatcttcaaaacaaactctgtcttgaagaagtttattcaaatcctgaaaaaagtgtagaagttaacaataaaattacagaaacccaaaatacactagattcattatatgaaaaatgggatgaattaagcagtattatggaagattaagacttaaaataggaattactatgacaagacaccatggtaattcctattttataatctctctaatttactttacaggtaaatatttttgctttctaatattcacacacataatcctttattcccttttctgctttaaatttaaaaatttcttctgccccttttctgtaaccaccagcttctctaaagacatctcttattttttctatgttctctaaataagatgcatctaccattaccttattcactgactctcttaactcctttgctgtaagcttgtccttgtttaatacaatagcagcccctagttcctttgctcttgatgccatatataactgatccgcaccaattggaatagctacaaaaggcaccttattatatattagatcacttgtactattcattcctgcatgagttatagctgcatctgcatatttcaaaatttctgtttgtggaacatagtttcttactataaaatttttaggtatattaaagttagaagtatctatattatatgctgacataacaactacaacatcagaaccaccaaaagcttcaaagaatatattatataaattgctattagtattgttaaaaactgtacctaatgatatatatattaccttcttattttttagtttttcaaaagggaaatctaaattttcctttcttttataaataggaggaccaataaatttaaaactatcatcataatactcaatattagaaacaaattctttagctgtgtaagctatatttagatctcctctacatgccattagttcacttatagcaggcatttttacaaaatatcttttttcaattctacttttagcttcactataggctctacttacaataggattgctttctaattctttttcagttatgggtgaatattgcattttcattacttcttttcttgtggcaaacactgcaaaagatgaaattgaaggcaccttcaatatttgggctataatgttacctgcacagaacatagaacaatgaacgacataatcaaatttcattcctttaattttttttagaatatcctcaatttcacattctgtcataccaataattttggttataatgtctgcataagatctatttcctgctgttttattagcatttttaaaattgctcattctttcaccatagcttataaatttagcaccggctgcttcaatactctccttaaattcatctgtgcaaaaataatatacctcttcacctcttttcactaattcatctactaatcctagcgtaggattaacatgaccgtatccagggaaattcataaaaagtacttttgacatatttaacacctctttgttttaaatgcttacatgtaaattttaccactaatgtaataaataaatcaaaaataaattataaatagaaaaagaaatcatctaagtttctaaaaaaactcagatgatttcttcttaaattcttaattcgactccactttttttctctttcatcataatatcaattatacgaactatttcttttccagcatctactgaaggtatacctttattatgaatattagaaaccacagttctttgtgattctggtttttttgtgcttgattcatacgccatgtaactgctcatactctcacccgttgcaagtcctggtctttcacctattaatattattgtaacctttgcatttaattcctcacttattttatccatggtagcaactcttgcatatttaacaaatataggtgttccaaccttatatccccttgattttaatttttctactattacaaaatatatttttcgaagatttgcattaattgcagttgcactaagtccatcccctgctataatttgaacatcaggctcatttatacagttattttttatataatctagagtttcttcagaaaattttcttccaagatccggcctagttatatactcttccttatcctttgccagcgtttgtacttttagaaaattaagtgtatctattaacttttcatctacgcttgaccatactgcatccattgctacagcatgatctgctctaaatttaagaaaagtatttgtttttaatcttgtaccagctctacccacacatattctagctggtgttaaagctttaagctctgataattcctcttcctttatatcatatatctttaataaattttccataaattcatctcctacataaatattgaaggatcaccggcatttcttgttaatttaccgttcttcattatccctaattcttccattcttttttcaaattcttttattggtcttttatctgatatttccctcaaagttgctatatcatgatagcttgaagattgatacataagcattacatcatctccacaaggtatccccataaggtagttacaattagctgctaaaagaagcatagctaaattttcaagatcattttgatccgctttcatatgatttgtgtagcatgtatcaactcccattgataaacctgtaagctttcccataaaatgatcctccaaacctgctcttataacttgctttccatcatataaatattcaggtccaataaaacctacaactgtatttacaagaaacggtttatatcttttagctaacccatagcatcttgcttccatcacaagttgatctgctctgttattaccttccgacgatagttccgtgccttgtcctgtttcaaaatacataaaattaggtcctttggagctttttttagttttcataagttcataagcttcatctaataaggctacacttattccaaaatctttatttgcaatttcagaacctgctatactttgaaacattaaatcaatcggaactccattttttaaggcctccatttgggttgttatatgagcaagcacacaattttgagttggtattctccattttctagtaaagtcattaaataccttaagcacatcagatacactttctatagtatctgctactggatttaatcctataactgcatctcccactccatagcttattccatcaatcaatgatgccataataccttgaggattatcagttggatgattaggttgaagtcttgaagaaaaagttcctcttctacctatagttgtgttgcatttagctgtattacaaattttttgagctgcgtatacaagatccatattactcataagctttgttactgctgcaatcatctctgaggttaatccatcccttatttcctttatcttatcttcatcattttcaagtaaaaactctctaaattcaccaactgttaatgccttaatttttttatactgctcttcatcaacagaatcctgtattactcttgtaatttcatctttttcataagataccacaggattgtttcttaattcttctagtgttatatctgctaaaacagtttttgctgcaactctttctcttgctccacttgccgcaatacctgccatttcatctccagattttttttcattcgcttttgcaagtacatcctttatatctttaaatttataagttgtattaaacaatgttgtttttaaattcatataactcacctatttctttatcatattaaactgcttccttttgctcttcttctatatcctttttactatttaattttgaatatacaaagtaatacacaaaagctagtacgaaagataatatcacccaagatattgttgacatacttgagtatatagttgttattaaaaatactgcatttaatactaaagctattataggtaatattatagaaaccttatagggcctttctaatttaggctccttttttctcaataaaaagaaggcaatcatacttattgcatgaagagcaatagcgccaaagcttgaaatcacaataattgttgcagtattgtttgtgagcacaaaaatcattcctataagacttggtactacaattgcaggcaccggtgaaccttttgagttaacctttgataaaaactccggaagatattttgatcttgacattgcaaatacctgtcttgaataaccaattattattccatgaaggctagctattaaaccaaataaacctataaaactcataaacttagataaaaaatttccttttccaaatataacatttaaagtatctggaataggtgaattggtgattcctaaagtcttattatcaagtacacctgctgtgcaaagaaaagtccctagagctaaaaccataagggttattattgcaattataaaaccttttgaaatatcttttttaggatttttacattcttctgctgacatagcccccccctctgctgctagataaaaccatattgcaaacggtatagcattgaatattcctgtagctccacctttatatatatttcctccaaatatcttaattggatcgatatgagtagcagatgcgccagcaaaaattataagtccaattattgctactattgttacaactgtttcaattattgcagctgttttaactccaaaacagtttacaataacgaataatgcataaaaaacaagagctgctactgtaactggaactgatggtataataaaattaacatacgcacctatagatattgctatagccggcgttgcaaataaaaattctaaaatacaagaaaatcctgcaaaaaaacctccaagccttcccatggttcttgatgcaaattcagaagaaccatctgcctttggcattgctgtagcaagttctgcatagctaaacataaaagttccataaaaaactgttactattaatgtggcaactacaaatcccattggactagtaaaagtaagtgcattattccatccacagtacattcccgatataaccattccaactatgatagcccaaagttgaaaggttgatagtgtttttttcaattcctttgccataaatattcccccaataaactatttttaaccttgtaaaatagcaaaggaacccaaacgtactttaatcgtttgagctcctttgctcactaaatgtaatattaaaaaattaaaggattctataaaatgccaaatcaatgctccgttgcatcaacttatgaatacagtgtatcatatgattttattaatgtaaacctcaaaaattattaatttattattttttgttattttttattgatatattttgaaatcaaacaccgttttagtgccactttcatttgtttcaatctttatatcaccatttagtttatcagttactatgcttttaacaatattgagtcccaaactatcttctcttaactttttgtccttaaaaccacttccattatcattaacagctatacttgaataactatatcctctatttattaagatttttataatgcctttcttcttatcacaaaaagcgtgctttatggagttctctataagctcatttaccactattgcaattgctgtagctttatcagaattcacataaatattgtctccatctatctttatacttatatttttattacattctagtgcatttcttattgcattatctttgagctttaagagtattaattttatatctgcatcatctataccattttgtgatatcacttcatgggttgttgctatacttaaaattctatttatactttcataaaaagcttttttagcaaactggtcctctattcttctagcttgaagccttaatatactggctatagtttgaagattatttttaaccctatgatgtatttccctaattgctaccgcctttaaaacaagctctttttctttctttttaaggtctgttaaatcctttataagcataataattccacagattttcatatctttttttatcaatccatatttaatctgtaaatcaaattttcctacttttgtttctaatattaatgacttttgcttatttaaaatatcctgtaatttaagttcattcaaaactaaattattaaaagacatgcccactatgtcatccttatatcctatttttttataaatctcttttgctacataattggcataaacacatataccattatcatttatggccaaaatcccatcatttatcaaattataggcggtattattctctacctcttttatgctcataagtgtttctgataactgttttgtggtttcagataatatttccatgttctgactttgccttacatgttctgttacatccctctccataattaaaacgcctataactttttcatttttatttcttattggaactgtattttgcttaacaactatattttcttgtgtaaccgccttaaaatcagtggttgacacccctacttccaaagttcttaataccgcaggctcattttttctcaaagcaaattctccaaccacagaacttttatacaaagatttattttctaaaggtcttgcctctgaaactacaatagcagtatcagaatcctttgtaagacaatctataaatatatctcctccagaaactgttgcaaacatagaaatagatttttcaatattcttaagctcttctatatcctcctcacttaaatccgtattcagcttacataattctctaagcacatttcatccctacttttttgtattatcaattatatttatagacatatctaatattgttaactgtctatccatactcatttttctcaactttctataagcttcattttcagtgattctatatctttccatcaatatttccttagcagtacaggtgattttaatagtatttagattttttttaatacttcttatttcttttccttttgctattgcaatctcaacctgtggtataagtcttacttcatctataggttttacaatataccccataacaccaatttcttttactttattaataaattctctaccactgtatgctgttaatattattattgaatctgctacattttccttaactaaaatttgagaagcttctattccatcaagcataggcatttttatatccataataacaagattaggtcttaatcttctacatacttctatagcctctagtccatttggcacctgcccaacaacagaatagcctgctcccgtaagcatttcacatatatccattcttgtaataggttcatcttcagctactacaactctattatccactttaaaatcaccccctatgatatattatgatttaatcataaataattttgaatttcaatacttttatcaaaaaacacctattataattaataatttattaattataataggtgttttacaaattttattgatatttgttaatacttacctaatgtatatctgctcccgtgagtacttccttcaatgattctctttgatattcattgccattaccaagttgtccataataaccccatccacaatcccatacactaccatcaattttaatggctatcgtattagcattacgtgcattaattttgcaaaaaccgtcccctaccttttcccatgttgatctatctgttgttgttccatctcccaattgtccgttttcattatttcctgttgcccaaagacttccattttttttaagtgctaaagaatgaactgctccacatgaaatttgagaaaaaccagtaccaactttctcccaagttgacctacttgttgttgttccatctcctaattgcccatatatattaaaccctgctgcccatatggttccatctgcttttaatgccatagaaaaggctttaccacaagaaatctgcacaaaattatcccctaccttttcccatgttgatctatctgttgttgttccatctcctaattctccaaattgattatatccggtgctccaaagtgatccatctttttttaatgctaacgagtgatctccttgtgatgcaacttgagaaaacccggaaccaactttttcccaaatatacttatctgtcgttgtcccatctcccaattctccgagttgattgctaccacaagcccacaatgttccatccttctttatccctaaagaatgttcggctccacacgctatttgagaaaaatccgaaccaaccattttccagtttgctactttggtttccctatcttcattatttcctaattctccactccagttaataccacatgcccatagcgttccatctttttttattcctaaagaataaccacagctacattcaacatcagaaaaattatctcctaccttttcccatgttgatttatctatgtacgtcccatctcctagacatccatattcattggtacctgttgcccaaagacttccatctgcctttatgacaaaagaacttaatcctgttgttatggtttgtgcatgcactctaaaattattattcgcattagctaaagatattgaaattcctaatacagtacttataataaatatttttttaaaattcattataactctctccatccatttaaattattatcattaataattataccacaaatattggtatttttgcttataatagtatttagaatgttatgtgtaacataattcaaaataatgttttaacgtaattttaggaattaagtataaaacgcctttccacaatatttaatatgtgaaaaggcgttttattaataatctaaaattttaacgagcaagctcatatattgcatgagcatatatttttgcatttagtattaaatgttcaatttttataaattcatttgcttggtgatcaacatctggttctcctgggaatattggtccaaaggctactatgttaggcatttcctttgcataagttcctccgcctattgaaagaagttttggctcctcactagtttgctctttatatactttttgaagaagttttactaattcatgatcttctggaaagtataatgacttctggtgtgtcatgttttcaactcttattccagtatcagctatcctagcatttattccatccatcatatcctcgtatttgcaagttacaggatatctaacattaagaacaacttttccttggtctttattaaagtctattattccaagattgaaggaaagcttacccgaaaccttatcttccataccaattccaaaagattctccgttagtttccattccaacatatctatttaagaaagctatataatcattaaaatcagattttccaagatttaattcttctagaaaagctaaaagctgcattatagcattttttccaagctccggcatacttccatgtgcagcaattccttttgattttactataaccatatcgtctttttcttcagcttttatatcatatccagttctttcagcgaaactttcacatttatcaatgatttcgccctttaaatctgctcttattccagcttcagcgtatggaggaactacatttgatctttctcctccttttacataaataatctttgtatctccttcgtaatcatttttaaaatcttttactaagttaaaaattgttattcctttttctccattgattattggatattcagcatctggagtaaagccaagaactggtggtttttcattctttaaataatgctctgtatcttttcctgaaccagtttcctcatccaaaccgaatataattctaacttttttagacatagtaagtcctgcatccacaatagcctttaatgaatataaacatgctactgtaggtcccttgtcatccattgatcctcttgcatatagctttccatcatgtatttctgcagcatatggaggataattccatccatctccttctggcactacatcaaggtgaccaagtactgctacataatcttctccttcaccatattcagcatatccaacatagttatctaaattaacagttttgaaaccaagtctttcagctaactttaaagcatagtcaagtgcctttgctgtatcctttccaaatggtgcatttccttcagcttccccgctgatacttttaattctaaggatttcttgaattgaagaaaccatatcatcctttaataagtctatcttctcgtttatcttatccattaaaaaacctccattaataaaaattatatataaaacaaattttgttttttactatcttcatactcatctattttatcaagctgaaaatcctcatacttatctgctttaatcattatttcttctagaaattctcttttatacttaaattgattttcatactttatttctctaaatacagaatactctattccttcgtcattatcgccaactacaatttcaggaaatacatcctttatatttttattcataattgcatattggtaaatagaagcatctatgatgttcccatgataggtattaaaacaatgtgcatattgtaattttctttttctagcttcaacatataaaatcccttcaaccaaaggaacatccaaatccttaagcttacatacctgacttataagtgctcctatcattggagcattgtttactatctgatattttgtaaaacaaagtttacataaacctttcaaaaactttttttctgcttctatcaatataccacctcaatacatcctaacaggcttatttatatctgttttattatcctctacatgaatatctattaaaaattgtcttaccttattggtataatcagttttattttttagatacgcctcagcatgcccagcattaggtgcaatatacaaatacttagcacccttttttatcgagtacaggtctactgacatttctggtggaatcaagtcatcatctgctccatgagcaaacattataggtgtcttaacatcttgaattgcttttattggagaaattgcataaactgaaaaccctgctttaaaaaatgcaattaaacttgaataaaaaacaaccatttttgcaactactgcaccatgatttttcatttcataatttagtttttctccaaatagctgtggaagatctgaaaacggacaatccaccacataaaaagagacatcctttgttttttcattcatgtttgattgtaataatgcagttgcagctcccatagattcaccatgaattcctattattcctcctggtgttttatttttaacccactttacacaattgtttaaatcgtatttttcgaaatacccaagagttatatcgtttcccccacttactccatggtatcttgaatcgtaaatcaaaacattgtaacctaagtccaggtatatatctgcatacttcatggactcccacctgcttccagttattccatgaactattattatagtttttctactgtcaacaaaatttttaatataagttcctgaaagcttatatccaaagttagactctataaccacatcgcttttattgaggagattatatctctcataattaaacgtggatttaaaattgttataactactttggcttctatcaaactgcattttacatactttatcatatattagatttcctacatacaagccaacacagtttgcaaaaataaatattaccaaaactactgctagcactattctttttattttgctagattttctcattcaccctcgccaccattaaggcaattacttttcacataattaaatcttttttactttgcttaattgtaccttcacatttcctttgataatctcaatatattctcttcttaaggtatcctgctcctttttttcttcttctgttaatccatcttctttgctctttttatataaaaagtttattctctctataagtttcttcatttccatgatatattttctccttaatgtcccttaatatttttagtaaaattttctttatctttttcatcttcaaatgaatttaaatcatatatatttctatgggaaaattcacaaatacaaaaatcttttcaattaaattatcttaacctaagcatatttcataagtcttttttcaaaaaatacaggttttaaattacagttttccgccattttaagcgcatttttaaaattaagacctatactgtccttataatgagaatcggaacctattgtaacaaaccttcctccaagctcactataccttttatatattggcatcaaattttcgcatacttcttttttattaagccttcttgtatttatttcaatgactatttctctgtctactataaacttcaaaacctcatctatataatcactgtattcattataatatatttccccatcgtgatatgctgcatatctcgatatataatctatatgtgcaagagaatctatatactcatgacaccttaaacaggctaacatagtcttaaaatacatttcaaaaacttcttttttaggtgaagacttatatatggttttttcataaagatctaaaccatttaaaagatgtattgaccctaaaacataatcaaattcatatttatcatttatactcttattttgctctttaatctcttctcccatgcctatttcaacaccaagtaaaactttgttactcctatatttattgtactctttaaaatatttatctatatcaaatacaaattcacctttaacaggataatttaaatcaatatgttcagtaattattatacctaagtttttcttttctccagcatcaatcgcttcttctatattcatctttgaatctgttgaaaacaaggtatgaagatgtgtatcaaaaaccataaaatatcacctcgcacaataaaataataattaattaatatttaacccagaaggctaatatcaaactaaaaccttagttttattatacagaattacttttaactttacaaaccacaaagaaaattttgctatatttcaggaacattttattactcatctacatatcctataatgtattaatcataattttaaggagaactttatgtattacaattataatgattttgacgattacgactatgatcatggatatcatggctactatgatcatgattatcacgaccatgactatgatgactacgactatgatcatgatcacgaccatgattatgaccacgaccatgattatgaccacgaccatcaccgcgaagaagagtttgatcctatgagatatgaagatgatgttctagatgcagaagcagaatgtccttttgtatcagattgtccagctacacgaagccaaatgacacctcctggtcctggacaaatgggtcctggctacggtcaaatgggtcccggttacggtcaaatgggccctggttacggtcaaatgggccctggtcatggtcaaatgatgcctcctggtccacctcctacttatgtaccccaaattcaatcagcttctaatggtcctgtaataaaggctgtagattctggtgccatacgcatgtgtagatataaatacacttatatttggttaaataatagaagatccttctgggcttatcttacctttgttggacctcgttctatagctggctatagatggaacggaaggcgctggatttacttcggattagatttaagacaaataagaagttttgtatgtagataattcatccataaagtatccttttacctaatttatgcatattgtaacctattaaatagttcaattgccattccgtaaaatgtggcaattgaaccttcaatttcagattgccattacatacagttcctcttataattaaaatataaaatataggggggataatgaggatatgagaaaatcgaaattaacctttattgctacttttttaattttattatttttatccatgccctacaaggcacatgcagcatctcaaactccaataacaagagctgatgcagaacaaagagccttaacaatgattaatctaaattggacatactctaaatcaaaaaatggagttttgccttctgcatactcaggaagtataactgcaccttctcaatttaggggtattgaaaacgttgtagctacaggaattccttattgttgggggggctttgatggtcttaactcttcatcctatggtgaaagttggacaaactttacagatgcagtaaataaaggtgcttttgttggcaatgtaaaatcatcttcctatggtcacataactggaactgctggacttgattgttcaggctttgtacaagctacttttaacatcaaggattataaactatctacctcaactatattcaatcaatatttcacaaagattgatataaaggatataaaacacatggatatcctaaaccttccaggcaaccatgttgttatatttgataaatggggaactagaaatggagtaaatggtgcttacacatatgaagctactccagatacaacttacggtggaattcaaggtacaaaacaatatttcatgagcatgaatactgtttcccaatatattcctgggagatacgttaatataaaagaagtagcctatgttcaagtaattaatgcttcctctttaaatataagaacaggcccttctacttcatatccaataatcggaacaataagtcaaaatcaaatagctgaggttactggatattcatctgatggaacatggtataaaataaaaattaatggtatagaaggatatgcttcttcaacatatctaacttacgttaacaattaattattaattaaaatggtatattagggaattgggtaatggtctaaatggagcagtcaacactgactgctccatttttatatttaattttttaatataatactcttataattgccataaaaaaaccatatataaatatgcatttgggttaaattaaattttaggaaatgaaatagatattgaaaacttgccattattataaaaagcttgtattgttccattcaaccgttttgtaatttctttagctattgtaagtcctaatcctgtagtctttttatttctagatttatcctttgtataagaacgttcaaaaatataatctaaatcatcttcggtcatgggttcactaagattataaaaagtaaacacataactactgcctacttcctggatttcaaaacaatattctcctttaccatgtacaattgcattaaataaaacatttgaaaatattcttttcactccttgttcatctccatgtatcatgcacggtttttccggtaaatgaacagatggttcttgtccctttttataaaaatcatcataatacataacaagtatatccataaaaatttttttcgcatctataggtatatgtttataaataatctctcctgattctatacgtacatattcaaataattgttccagtaatatcttaaccatgttttgccgttccagaactattgctaaatattcctgttgttctttatctaaatcacttgccttaagcatttgaacatacccactagcagttgttaatggtgtacgtaaatcatgggaaatattagttatactctgtctgaaatttctgtttaatcttttaatttttatacgagaccttcttatatctcctattaaattattgagttgattaaccagctgagcaatatctctttgttttactactactgtcaaaagctcattggtatcttttatattcataatttcttttaattgtttggtaatatgtttaatattcatgcgataatataaatgataaaaaataagcatgacaagtataaaaaggaacaaaaaagttgtaaccatccaaatgtttttcatactaactcctttatatgaatcaccttgtatttatacaaaaactaaaattatactacttcatctttcattgcttctataatattattttgcttaattgatttagaagaaatccaatatgacaagaatatagaggcaaatattatgataacataaattgaaatttctgtaccttgaaaaacagccataaattctttccatgttattgatgttagcttaagcatataaaaacaaatgataaatacaactggaataccaataataattggtttcaatgcaaaaaacaaaccttctaagccaagcattttatttgatcctttaggtgttactccaactgatcgcagcatagaaaattctttcttatgaagcctaatattatttgaaacagttgaaaatgtattgaaaataccaattattccaatcattaaagcaacagcaaaaacgctagttgaaatagctttctggataagctcttcatgatgcttttcgtctactaagctccatattgtaaaatcctgcgatcctaagtaggaattacaaatttgtgttagctttttctttacatttggacttgccttatccccaactaataaatcaattgacattatattagcttcaagctcacgacttgatgaaaaattaccaactatctgtttataatttttcacaggaataattaaagctaaattgtatctattagtttttatgtcacttggacaaacccctgtaacatcacctactttaatcttgaatttattatttgtttgcatattatcttctactttttcatataaaagcattttacttccagcttttgtatttaacaaaggtaatagtttcacctcactagaattatctggtttatactgtgtgctatttaatagtatacctgttgttgcatcttttttataatatttttcagaattagtaccaatttttttgcaatacttcttaaaggcttcatcattcaatcctaccaaattcactataattctatatctgccattttgttttaatacgttgtactttttgttgtcaactccggcaaatccaccagctttagcaaaaatttttgactcctgatttgattctaaataagttgaagtacgtacttgccttctaattacactatctttaacttcaggtagagatataattttattaatcattttttcatttggttcatcaatagtgtttaaattaagagtaatatcatgactaaatattttgccgttcttagaatttgccaaattatatattgaaataatattaatataggctgctattaaaataaaacatattgaaatagataaggtagctgtacgtaaacttttcttattagctgaagcttgagaacttgccagttcaccttttataccaaatatttttttaatcattgaatgattttttatttttgccattttcatattctgacgtattccagaaacagctgacacttttgccacttttcttgctggaatataagcagaaattagaacagtaattaacgaaataactgccgaaaaaacaattactatgaaggagaaagaaacatggatactattataatcttcttcaatactaagaattccattaactttagaaaatacaccataactaaaaatatatcctacaattaaaccaatcggtaattgaataatccataataaaaatccttcataaattacagaatatttaatttgttttggtgttgctcctaagctttttagaatactcaattccttaattctgctattagcagatagtgaaaatgcattataaataataagaataaacgtgcccatgactagtaaaaataaaattatcactatagtcataattataataaattgggtatttgcgtcactgttattactaattccatatagatttaacaattgagtattatacataacattatactgaccatgtttatctttgtttaatccaacatactcggcaatttgcggtaatgttttatatatttcatatggattattaaagcgcatgtaaactgttagtttgtcattcggtttgatatgtgaaatgtttaaatatcccattgcaatataccctggataagctgaaattcccgaaatatctaactcaccaactattgtataagttttagttccctttaccttaaatgtttcacctaaccttttataagcttgagtttgaagtactttattgtttaacattctatttcctattggaagtgtcagcttatcaccaattttgtatgcaggattatctgtaaaaaataattttgataccacgatttccccactttttttaggaagcctgccatgtataagctcatttttcaaattcatatcgttccaaaaattttcatctgcatctctcattaaaaaatatggactttttgtattagaaagttcagcagtaacccaatctcctttaatcattacagttttaacagatgaatctttttggatttttttcaccttgtcaccagatatatcctccttcaattttccttgccaataacctgatttttgaattgttgatgttaccttcgcactccacatagagtaaataaatatacaaagcgaacatagcaaggccgatgcaattgttatagccactaatatagagattgtatgccttttattcttttttatttggttataggtgtattcattcattattttcattgccccatcacctcatccgaaactatttttccatcaaaattttaatacttctatcagctaaggcggcaatttcttcgtcatgtgtaatcataacaattgtctgcttgtactccttgtttgaacgttttaaaaggtcaatagttgttttggtgttttttctatcaagattaccagttggctcatctgccaaaataatagacggcttataaatcagtgctcgtcctatagctactctttgctgctgtccaccagaaagctgatttggaaaatgattaagcctttgcgtcaaaccaagcatttctacaatattattaaattcttctttctttggttttacattatctaataacatgggtaaaagcatatttttttccacagtaagagtaggaattaaattataagattgatatattaatcctatttttcgcctacgaaataaagcagcctctgtttcattcatatctgaaatatctgttttatctatatatatttttccttttgtaggatgatctacacaccccagcatatgaagaagtgtagattttcccgatccacttggtccaattattgagacaaattgccctttatctatttttaaatttaaattatctaatgcagtaacctttgtatccccatttccatagatttttgaaagattttctgttcttaatatatacaaaatattatctcctctcatttaattatctaattacatttttaattgacaaacttttatttattatcatcaatcaatatctctttttgagaatattaaactagatgccaaaagtgtaattatcccaattaatacaaatataattgaacatttcacaacatcttctggttttgaattaaaattaattagggtattacgcatatttgtaagagagtattttgtaaaaacatcattctttgttaataaagtaagtaaatttgttataagattgcagcttaccactaataacatagaaactataattgtaacgcttacactttttataaaataagataaaaaagtgccaactccggacacaccccaaaacatgcaaatcattcctatattcattcgaataaatgctgctataggaacttctcctaatcgaaagaaaattgtatctgttaataaatttaaaattccaaaacttaataagattattgtaatgatagaagacatagctatatactgtccaagaactaatttccatcttgcaattccatggcaggccatttgccgtatgctgccatttgcatactcagcagtaattaaacaaaccacaaatataaggataatatagaaaacaaaatctgcattgtaggattctcgatagctagaaaatcccgttactaacgtttgtccttttatcttagaagtgacaagagttgatttctttaaaaatatagaaatacaattcattgctaggagtataattgatatggcataaaaaattttacttttaaatatcttataaaattcactagaaattacatttagcattattgattacctcccatcattttcacgaaatacgcttctatatcatttccttctaaaccaatacttgatactaaaacgccattttcaatcaattctttattaatctgggctggtatatccaggcaatcataaatgcaaatttttccttcattaaacacttcaaaatctgaactttttatgtcattttttaaaatgtaagctgccttttcagaatcattcactactacattaagacattttttgcagcgctcattcaattcagatgctttaaattcatcgataagcactcctttatttatgattccatattttgttgcaatcttagcaagttcgcctaaaatatgagaagaaattaaaatggtaatttcattttcagtatttagtcttaatagcagttccctaacttctttaataccgtaaggatctaatccattgatgggttcatctaagataagaaaatcaggattacctaataatgaaattgcaatggataagcgctgtttcattccaagcgaaaaagctttagttttcttttttcctgtatcacccaagccaactagatttaaaacctcatccacattactatagtctacaatgccaagcaacttatcgtaataaatcaagttttctcttgctgtcatataagggtataatgctggatattcaataatacatccaattctttttcttcctttttctacatcgctgctttcaaataattgaatatccccctgactttgatgaattaatccacaagcaattttcataattgttgttttacctgcaccattcttacctattaaaccgtaaatatcacctttttcaaccttcatattaatcttatttacagctaattgttttccatatttcttagtcaaacaattagtttgcaatactaatcccatatacttatacctcttactttctgtaattaaaatattttttaattctatatttaaatagtaactaaaaagtattaaaatacattttagaatttatcaagaaagtatcaagttttataaatcaattatcttgcattttatatcctattccccaaactgtttttatatatgtatcaccatgtttcaatttattgcgcaaattactaacatgcactgtaacaactctttcatctagaatatattcttcagaccaaacactttcaaatatattctgttttgtaaatactttcttaggattgctaattagtaattctaatattttatattcttttactgtaagttcaataggttcattattaatggttacaatatgattttcactatctaaaactaaatctttaaatgtgaatctattggttttatctatgcttgtccccttattcattcttcttaatactgcacctatccttacaattaattcttcattattaaatggctttgttatatagtcatctgccccgtctcgaatcattccgagtttagtatccaaatcatcttttgcagatacacatataataggaatttgaaattgttcattaatctttgttaaaacttgttcaccacttaaacctggtaacatcaagtccaataaaatcaaatcaaaagactctttttctagtactaatagagcctctgtaccagaaaatacagctttcgccatatatttattttttattaatagtgtttgtatcatttcgttaattttagcatcatcttctacgattaatatcttatccatcctactcttcccctttacgaacgttcttaataattacatatttcttaatttttttccttagttcaataaagttattataatatattaaattcagatagtacaaatttatggttggcttacactcatagcttaaaatacctaaaattaatatcctttataaaaaagtaacttataagtaggttcttgattacttataagttactttttaaatttagcttatttcaagtttaactttacttcctccaactccagcttccgcagggcttactatgagccttactggcatcctttcttttattacttcaaggtgacttattattccaacagaaagtctttcactgtgtattttttcaagcgaatccattactacctcaagaaggttgctgtctaaagttccaaaaccttcatccaggaaaaataattcaagtggtgcacttccccttagttgtatttgatttgaaagagaaagcgccagcgctaaggaggttacaaaagtctctccccctgacaaagttgaagcatctcttttagctcctccatttttataatcccttataatgaactttccattatcatctacttcaagtccgtaatttccaccagtgatttcctttaatctttttgaagcttctattgatatatatttaagctgatttaatgcaacaaattcaacaaattttttacccttaaataatttttcaagatcatctaaaagacttaatttatgttctaactcttgcttagttttaagaagtttcccaagttccttaagttttatttctatgtttttaacctcttcctcaagttttatacttctttcttgaagcgcttttgccttggaagctttctcaactctattattttgaatttctatccacttttcttccgttaattttctattcttaagcttcttgcttaaaacctccacagctccatttacctttgaaagttcatttttatacttttcaacatcgcttttaagcaaatttatttctttatcgtttagataattttccttagctttctctatattttcaaatttttcttccataagtattttatttaatttgtctatatcattaactttcctatccttgagactggacaaattactgtgatactttattatttcatcactacactttctgtatttgtcctcaatttcattcattttcttatcacataaattatactgttcttcaatttttttaattgtaccctctatcttttctttaagttcgtataaattatctaatactcctactttattttttattagttctattttctcgtttattattttatctttttccttaagctcagctttatttttgctaagctcctcctttagtctactacacttatccattagctgctctttttctgtgtgtcttatgtttaaaaggtttcttagatcctttatttcaccttctgcctctacccttactctttccttttccaatatttctttcatttcaaatttaaaatcttgaatctttagttcagcttttaaattttctattgtatatgctacttcattaaattctttaatagcctcttccaattcgctttttaaatctacaatacgtttttcacactgcttttcaactgtcttttccttctgatattcaacttcaattttatttgagcgttcacttaagtcctttatattatcatcaagttgtattttttctaaattaaatttgtttactttctcctttaaataattaaatttcttttccatactttcaagagaaacttctttaaactcttctccaaggttatttatgctctcattaagctttttaatatttttttcttctactttaatgctagcttcacacataactatttcttcattttcaaacttacgttttttttcaaagccttcgagctcactcttaagtgtttccaaagcctttaggtcaacttccttaaatccttcttttatatgatgcacagaaccacatacaggacatgcctctccactcttaagcttttctctaagtacatgagccatgttttccgtctctaaagactctattttaatattaacttttgatattttatcctctaattttgtcatttcctcttttttggttcttagaacttgctctgaattttctacaacccttaagcttgcctttaagctttcattatactcactatacttagcccatttttgcctagaatcatttaatttttcttgaaatgtaagaagtacatcatctttaggaaagtccttatttaaatcctgaagcttttttgtgtatgtatctaatttacttctctcttcctctaacttattaaaaagcatttcttttttacttttagctttttcaaaatcaacttgaaatttatcacaatcaagtccaagcttatttttatgttttaatttttcatcataattcctcaataaaaatattccttcattaattttatttttatattcttctggaaccttaagattatcaatcttactctccaaattctgtattttcaaagttaatgagtctatatcttttatgttctgttttattaattcttctttgttactcgcctctaaactaagcttttctatttttccttggagccttttcttttcaagctttatattatccaaaagatctttttcttttattgcatctaatataatgtgatgtttaatcataaacttaggaagtgctttttccttattatcctttgcaatacttaattttttctccatgtcctctttttccaagcttatagctttcattgtgttctcacgagaaaggatttgttcttttaatatatcaatttgttttaaagtattttcataattatcaatgtaaggcttaaccttcgacgaactttcacctaaacgggctcttttttcctttaagtctatttcatcttttttctccataagatctttacgaactctatttttttcctctatttcaatttgaagaccccaaacctcttttccttcattgtattcctcttctgcctttagatactcctttgaagcttcattaaagaaatcattattttctttcaaaagctctcttctttcctttagaacatcttcatttatattttcatatccctttaattctcctactaaaacattttccttttctctttcttttcttatttttctagctaatttaaaagaaagctcatccccgtattcctgaagattaaatagtctttcaagcatatttcttctttcttttccttcaagttttagaaattcgctaaactttccttgaggaagtacaacagttctcgtaaaatcatctaagctcagtccaattatttcctgacacttttcatttacacttttagctccttcttctaaaacttcaacctcatcccctgtaatatcaacaattttagctgacttacttctaacacttcctgttttattatctcttctaaattctctttccactaaatatctttttatttcttttcctgatatctgaaattcaaagcttacgttaaggctattacaattcgtattcataaagtttgaactttttcttgccacttccccgtaaagtgataaggttattgaatcaagtattgtcgtctttccacttccagtaggtccaaagattccaaatagtcctctctttgttagtttttcaaaattaatctcctgttcattctcaaagctgtttaatcctttaattctaactcttatgggtttcatcttctgcctcacctccatttataatagataacaataaatccacaacctcgttatctggctcaacctttctttcttttttataaaattctttaaaaatctcttcgaaaggtctttctttaaagcttgccatgtctataatctcattatccacactaaccttaggcaaaatttctaatatatctttttttagacttttcattgccttcatttcttcttcgcctatatatttatcagttactatctcaagataaacccaacagtccctgtccttattttcttcacatttcttaatcgcttcttctactccagtacatttccaaacttctataggtttatataccttaaattcaatttcatctacaataggctcttttcctgcctctatattcactaaaaaacattttttcttgaagtttatctcctttttattgtactggattggcgaacctgaatatcttgctattttatgtgtacctggtactaactgcggtttatgtacatgccctagagcaacatattgagcatttttaggaaagcagtctccatttacaataaaacttcctccaagctgaacatttctctcagaaccgccttcttcacttcccatcgcaaaaagatgagaaaccaccatatttatagtatcatctctaaagttttcacttaacctatcaaaaagctgttttattctatcaccatatgattttaccttttcctcttcactgtccatttcttcataaagaacttcatttaatcttttttcacttggataaggcagcgtaataatagatgccctttcaccattaacttcaatttcaataaagccctccttagatgaaagtactttatgttttccatattctccagtaggaacaactgatttaggagtaccaaccattattatgccatgatcacgtgcaagcggtcctgcagccacgagcctttccgggttatcatgatttcctgctataacaagggttaccctctctccattttgtgatatttttttaagtgtgctgtaaaacattttctcagctctagctggtggattgtaggtatcatatatatctcctgcaataacaaccatatctatattattttcttcaactatcttaataaagtcttctaaaaattcctcttgttcatccattctactatagccttctaagtttttacctaaatgccaatcagaagtatgtaaaatcctcattaacctatccaccccttacttgtaaccttttcattaacatttcatataatatattttaacatacattaatattattcagtaactactttacataaatggcgcctttgaaaactattccatttatcctttttaaaacaaaaacttgtgtaagcacgaaagttttccctttaccacttacacaagtttattaaaattaaataaagtatacgaaaaagcagataacccattagttatctgctaaaatattatgaactttttcctgctaacattttagaaggatctctactttgaatgagcattttaccaggtccctcaaacacgcaaaccagcccttctcctccagtaattgaaccaaataaaccatttaaaagctcaactttatagttcatactgctttcccataatacaagatgatttgtatcaactatgtatttttcaccttgagatagagttatttcatgtatagctccatatgcacttagaaacaagattccggaaccctctgcttctatttgaataaagccctctcccgataaaaatccctttcctccgccagactttatattaagatttattttatctgttgaagccaaaaagcttgctttcccaagcctatattttacagagccatccatattaactgctttaatgtctcctaaatatttaggtgctactaatatttctccataacttttagcaacgtattcttgaagaaaagcagaagtgccactaaataatcttccaatagcttttccaacacttcctgcctttgatttaatttcaaaattaggattcatagctgccatagctcctgcttctataataaccttatctcctgcctgagcttttactttaagtaacctatttgtatctccataaagcatttcataatctgccgccatttaaattcccccttataaaatattcatatcaaaattatatagtataaaataccattctacaaggttttattttcctctttaatgttttttcgtatttatatagaaagcctcatgttcctcaccctcatccttgaaagttctgcttaaaatacctccattttttaaaattgtttttcttgaagcctcattttctttcttgcatactacacatacttcagtaagtcctttttcccttgcatattctaatatttgtcttaaaatctcagacgcatatccttttcttctttccgaaggtcgtacactatatccaatatgacctgaatttttataaaaatcatttaaataatgccttaggttaactattcctataattttattatcgctttttctaactgcaaaaaaagtagttgaaactacccactttggatttacagtttccttttttaaattatttctaattatctttagccactcagcgtagtcatccacataatcaagtttaaagcttccatttataatcctctcaccacagtcaaggaactccttcttaaattccatcgccctaacttctaattcctctttaggaaatactaaaattatctcctccattttttatccctctattcaaacaactatattataccaattataacttatctacccaattaagtaaaattaagaggctgcttaaattgcagcctctttactatatctcttctatattaagttttttctgctcaccagttatcatatcctttataactagctccttattcgttacttcatcttctccaattaaaattacatattttatatcaagtttatttgcatatgtaagcttctttttgagttttccttcttcaaaatatatttcagcactttttccgtttacaagtaacttgtttaaaattttagtgcagtactcaaaggtatctcctataggtactattaagtatttctcatttaaactgctgttataattttctataaatcctatttctctaagtacaaagaaaagtcttgttattccaatagacataccaacccctggaagaacattttcagtatagttttgtgctaaattatcataccttccacctgaacatatagaaccataggattcatttcctgttagaagtgtttcaaatacagtaccagtatagtaatcaagacctcttattattttaaggtttatagcatactcactgtcttctactccaaatagctttaaatactttataacctcttcaacttcttctattcctttttcaagcatttcattttttatttctacttttttaagattttctacaacctcatcacttgaaccgcttatttttattaccttactaataaccttagccttctcttcacctataagcttatttagttcagataaaaactgttcttctgtaatcttatcatatttgtctatgagaatcattacttcctgcatattagtaatgttaagtccttctaaaacccctgtaagtatttttctattacttatttggaacttatagctatcaagtcctatttttcttaatgctttagatgccatgtttattataaatgcatcattttttatacttagatttccatttccaacaacatcaacgtcacattgataaaactctctataacgccccttttgatttctttctcctctataaacctttcccagctgatatctcttaaacggaaaagttaaatcgctcatatattgagctgcaaatcttgaaaacggcactgttaaatcaaatcttaaaacttgttttctatcctcattatcaatacgatatacctgtttttcagtttctcctgccgattttgcaagaagtacctcttccttttcaattattggggtatccataggtaaaaatccattttgctcataaacaccagttatttttgaaacaatatcattgaatacaagctgttcttttggtaaaagttccataaatcccggcaaaatcgacggtttaattttattattcattataattaatcttcctttctacagtataaatatagagaactactgcaataacttatagcccgctgttttcttataataatctaatccttttttataataatataacatttttatgttttattaaatacaatacattatatattataaataattttcattcatttgcctaataataatttataaacgctgtaaattaattaaaaggtggcgatattgtgagaaaacttgtgttattaagacacggtcaaagcgaatggaacaaagaaaacagatttactggctggactgatgttgatttatctgtagatggagttagcgaagccgctcaagcaggaagaatactgaaaaaaaataactatacctttgatgctgcttatacttcagtgcttaaaagagccataagaacacttcaaatagttctatatgaaatggaccttctatggatacccgtctataaatcctggaaattaaacgaaagacattatggtgcacttcaaggactaaacaaagatgaaactagagataaatatggagaagatcaagttcatctttggaggcgttctgttgaggtaagaccgcctgctttagaaaaatctgataaaagataccccggtaatgaaaaaaaatatgcttcgttaaaggaagaagaattgcctgttactgaaaatctagaagatacagaaaaaagggttttacaggactggcgtgaattaatagctcctaatataaagggaggtaagaatattataatttctgctcatggaaatactctaagagctcttgtaaaataccttgacaacataccaagcgatggaatagcaaatttaaatattcctactggaacccctttagtctatgagcttgatgaaaatttggaaccaataacacgctattacttaggtatggatggaaaaatagaggatgataaattccctaaaaaagtttaaaaaagtaatgccttaaaacaaaactattttgttctaaggcattactttttatctattaaatgcttttcttcttggaaataatagtgaaatcccaacaattataatcatgcaaggtgcaataaatacctctgcactatatggtacaaggtgaagtgcttctatttcaaatatcattccgaacaaaaccattactgctccacctatattaaacctgccaattttatataaacgctgtgcacctacagcaattaaaatcaaaggccaaaaaaccgaactcacatttctaacatctataattcctaattgtgaagaaagcattgctgctccagatagtataataataactgctataaataatcttgttttcatattaaccactcctaaacgtaatttatgatgtaattatataattattatatagtatctttaagtgagctaagtaatatttaatacatgacataagtcataaatatatatgcttattattcaataactataatattatcatctactttatcatcttcatcctctctcgcatccttaaccttagtaagtactattccaccaattacaaacaaaattaaaatactaaatataccatttgtagacttaccagttatttgagtaattacagcaactaaaagaggtcctaaaattgaagcaaatctcccaaatatattaaaaaatccaaaaaactcattatttttttctttcggaactaacttgccaaaatatgatctactaagtgcttgtatacctccctgagatgtaccaacaagaacagctaatattataaagccaagaatgttatgaatgaagtttgcatacacacaaattattgaataaattattattccagcataaagcattgtctttcccttaaatttttctgaaagtttgccaaatataatggcacacggaaaggctataaactgagtaaacaataatacaactaacattactgtagagtttataccaatatcagctccaaaggaagttgccattgttataattgtgttcactccatctataaagaagaaatatgatatcagaaatataactaaatttttatgctttccaatatttttaaaggtactccccaacctttttatactgtttacaataaccctatgctctttttttatcccataaatctgtttcacatttttcattataggaatagaaaacatggtgcaccatattgcagttattacaaaggttatcttacaagctgtcataatggaaattggaattatatgaagctgcgctaatattactatactcatgcatactgcaaaagctaaaatatttcctaaatatccacacgcatatgcaatggaagaaagcatatccattttactctttggtgttatatccactaaaaatgcatcataaaaaacattgctaccggcatttccaatagtacttattataaatactataacaagaggcaaccaagctgaatttggcacagcagcaataagagccgtaaaaattatacctataatacaaaacactttgaagaacttcattttatatccaatataatctgctatagtgcctaataagggtgctaaaagtgctatcaaaagccttcctattgaatttgaatatccccaataagctgttgaactagcctctgatccccctgcatttttaaacaccattctaaaataaataggaagtatagttgttataattatcatgctgtaagtagaaatagtgcaatcgtataatatccagcttttttctgccttgttgtatttattcataaagacacctctcttaatacagtaaacttaagctatacatgtacaaatctttcacacgtatagcttaggtataaactgtttttactataacttttgttcaattatatacttattacattatggaaatattaagtttatgtaaaaatacccaaaatggatttaactgcatactatagatagtagacatatctcatataaatgaatattttggcctaatataggcaaactaacttcatgaaaattttaagatttataatatatggcattgcaggatggtgcgtagaaatagtatggacaggattgggttcaatgctaaacggcgatgtaactcttcgcgcatggacaaatatttggatgttcttaatatacggcttagcaatctttttggaaccaattcacaacaatataagacatttgcctattctagttagaggggggatttattcaacattaataatcatttcagaatatattactggttcttttttatgttttatgttgggcacctgtccttggcattacagttcaggcccttttaccatccaaggaataacacgactagactacttcccatattggctaattgcaggactactttttgaaaaacttcatgatgcacttttaaaaatttcaattaacgtagaacaatcaagctcgtaatacaaaaatgcttttaactttgtattgcgataaaataataaatcacataaaaaaacatatgtgatttattattttaacaaagtgaggtgcaaaattcactgttttaaaatttgtgaattaataagaatgagagaagaaataaattacaactttcaaactgttcatttaattaacgttgtgataatatctgcaattttattcctctccattgttttagcatttataaatggcttagagactaatcagcttgctataataatatgtacagctttgccaatggaggttataacaattttaatatataaatttaatactaccacagacttaaaggctatatgctatagcatactgatattttcatctgcatatctactaaccttttttaattcaaaattatcgctagctttttttatctacttttttataagtattacaaccatttctatgtacttcaaacaaaaactcatactaattcacggacttcttcttaatttagcttggataatgctgtatgtaatttcacctgaggaacttggttatccttcaaacatttcactatttacagctattttagtactcatcaatattactatttatttaatgtatatcaagattagatggacaaacaattttactaaatccttagaagaaaaagaactagaaaatgagaaactgctgaaagacctaaattcctctatggacgtaattccagaaagttctacagtagtaaataaaaatttaaaaaatttcaatatgaatcttacttttctaaaaaaatctagtaatgaaatgactgaagctgtaaacgagaccaaacatggaatgagtgaaaatattgaaaaaggaagcaatgaaataaatgaaatgtgtactaaagtacaaatagttaaagattcagtagattcatcttttaatgctgtaacaaaactcaaggaaaattctagaagaataacaaagtttcttatgaccattaaaaatatagcagatcaaacaaatcttctatctataaatgctaatatagctactgcaagagctggtaaatcaggccgtgaattttcagtggttgcaaatgaaatagctaagcttgccaataacagttccgagatggttgaaaatataaatgaaattattgaagatatagatataattactagggaaacattttataaaataaaggaaggaaataccgctgcgaaggagagcttaactatcgtatatgaagttttaaataaatttaattttatagctaattcctttaatgtcaataaatttaatatacttgatgaaacccaaatgataaaaaatataacttcaacttttaaagaaattgaaaatgaaatggattttatatcaagtatttctgaagaacatgcagctgccagtgaagaaattcttagcaatattgaagaacaaaatgaaaatataaagcaaatccttaatgcaatgtatgaattgaaattaattgttgaaaggcttatgaaggttataaaataagaataaaattaagggaaagcttattgctttcccttttccttattattcaacttcaaaactctctatattttcaaatggtacatagtgctgcttagttggttcaattcctttttatggtatacattacctaaatcttgaacttatgtaccaattcgttaagctttaacgctaattgtgcttggctttgagatgcagttgctacttgtcctattccgtgatttgcttcttcgattccactctttatattataagtattttccgatacactttgagcactagatgccacttcttgaatagcactacttacatcactcatggtttcatcaacagctttagccattgcagatatgttttctgaagttgtacttataaattcagcatcctcatagtacttgttgccaatttcctcaaatttcttaagctcagctttcatatcatctttcataaataccataacatcattagcactatttgaaagattttcaaatgcaacttgtaccctttcaattgtatcttttatgccatctactgattctcctacttcctctgaaagttttctaacctcttctgctacaactgcaaaaccttttccactttcccctgctcttgcagcttcaattgctgcatttaaagcaagtaaattagtctgctctgctatacttgctatagactctgccatttgttttatctcaccaacgacttttccatcttctattgattttaatatttcgttttctttatccttataaatactctctactttatttacagattctactccactatttttaacttctatggccttttctctagatttaattgaactattgctttgctctactgtattatttgataattcacctatattagcattaacttcttcaactgatgctgttaactcttctgaagatgcacttgttctttcagtttgttctgctatatatttagttgattctgttatctcttcaaatttagagttaatttcctcaactgtagccgaaagctcttcacttgaagcacttaaatcttgagaattttctaaaatagttttaataatatttttaacattatcctgcgctttcataaggaatttacttgtatctccaaattcatcttccctatcaactttaagctctgacgaaaaatcataatcagacatccttttaacaacattatttatctctaacaagcaattcttaatatcttttgttaaaattagagaaagtgcaataactataacaataattaacaccataataaatattagtaattttacaaagttagcagctgttgctgtatttgaagcattctcacttctagattgagtaaagttattatctacaattttttttgtttcttcaaatattttttgtctgttttgagaatttgatttatttaaatttgccgctgtatcaaaatcatttttctgcgcagcctcaataaccttatcaactgtacctaaataattttcactagtttccttaatagtttgccaactctgttcattagcggcttcactagatattgcttcatactttttaataaatgtagcaacttctttttcatcgtttacaatttcagttttagcttcttttatatttgaaacatctctttggtatactatttttaatacatctgctcttatttcagttaatctttgttccatttctcctaaatagtagactttctttaaattaactttatacattttagtagcactaccgcttactttttctaatgttccaagagcagttattccaactattataagaaaaaccataataattaagaatgaacttacaagtttagttccaactttcattttccccattaatttcaatataatcaccctttcagctaataatgttaaatatataaacattatcgatatttatcttcaatttctaaatatataaacgttaatacaataaaaaaaacgtacatagattattcaaacaaatccatgtacgttccttactcaaatttatttcagctttgttatattaaacatattatttaatactctaaagttttgcacaaaaggctgtgctaaaacccaatagcttacacctcttagtccatatcttgaaactagtttatacttttcctcaacacttctcgcatcttcaaaccaaaccacatgctgccttccatttgcatcgacataattatagtaaggagcttgagattttgtatcgtattttattatagctccatatcttcctgccctctggacggcttcatcgtttcctatgctttctgcaaattctcctttaggtacatatggaagtgtccagtcataaccgtaaagtggtattcccatcattatttttgatggaggtataacacttacagcatatcttattaccttttcaacttcatctattggtgcaacagcaagaggaggccctcctgaccaaccccactcgtaggtcataattataacaaaatctactatttgaccatgagctctataatcgtgtgctccatgccaagaaccttctgttatatcgtaggtttttggtgctaaagctgttgccacagtataattaggatgcagtgctgccacaagctttctcagaaaatcattatacttttctctatcttttggaggtattctctcaaaatcaactactactccataataacccttagctcttattaaatttaatatattagttataagagtatttgaaagggactcactattaagtatgttacttataagctcactattgaaatttgatccagctgtacctgttatatttgtaaccgaaagcataggcttaacgccggctctttgagcttgatttattatattttcatcatcaagaggagtaagtcctgcggtttccgttacatgatgactaaaaggagttacatacgtaagatatggtaatgcaccacttaaaacggtattttctttttctggtgttgatggctgaataaatgcgttaacttctatatcgccataactcttggcgttttcaggtatcctaattaccaatccaggttgaatctgagatggattttcaatattatttaaatctgtaatgctcttaggtgtaactctaaaccttcttgctatggaccacagtgtatctccctgccttactctataggttatttcagtacttggaaccacaatcgcctgcccaactactagtctattattttgaagattatttgcatctagaatactttgaggtgtaactctaaatcttcttgctattgtataaacactgtcgcctggtttaacaacatatattctcaactaatttacctctttaaaatactaccattagttattatattcaaagctgttatttctgtgctttctccgctcttactttttttccctttattgtcttatcctcaattgcattaagtactatatcaccttttcctgataatatttcaacatatgaaaagttatcatgtatatcaataattcctatatcttctgggcttaccccatctatacttgatatagttcctgctatatctcctggtcttatcttctttttctttcctgcacttaaataaatttttgtaatatccttatttagtttttcagatttatttgcctttgttttatttaactgtttagaagcggttttaaatacttcttgcccttttttaacctcttcccttgttggaggctcttcttttattatttctaaagagaactgttcttcaatttccttaagaaatctttcttcctttgatgtcacaaaggttattgcgatacccttatttcccatacgtcccgttcttccaattctatgaatgtagctttccttctccataggtatatcataatttataacatgtgtcacattttcaacatcgatgcctctagccgccacatctgttgctattaaaaatgtaaattctcctcttttaaaagcattcataactgctattctattctcttgaagcattcctccatgtattgccatacaggaaaacttcatatttttcatcttaaccaaaacatcctctacgttgtttttagtcctgcaaaatattatagagcttccaggtacctctttatatattactttctttagcaaatcaaacttttcacgactttcaacctcgtagtaaacctgatgaattcctcctttggtctttccttcattttgaacctctatgttctcaaagttcttcatatactttttagaaagcattactatttcctccggcagtgttgctgagaaaagaaaagtatttttatttttaggcatttttataagtatgctttcaacctgctctataaagcccatattgagcatttcatctgcttcatctataataaagtatttcactttttctagattcaaggttcctctttcaatatgatctagaactcttccaggtgtaccaactacaatatgtactctttgcttaagctctctaatttgatttgaaattggctcttttccgaaaatacttatgcaccttaatcttttaaatcttcctatatttaaaaagtcctcttttatttgataggctagttctcttgttggagctaaaaccagaacctgaggctctctttcttcgagttctattttttcacaaacaggaattgcaaaagccgctgtctttccacttcctgttttggcctttgcaattatatccttaccattaagaattacaggaataaccttttcttgaatacttgatggttttttatacccaagcttttctattgactttaaaatttcttcacttaatcctaaatctctaaaacttaattcactcattttagtacctcttattttcttatattatatgtaataaaaccttatatagtataccactcaaacaacaaatttaatataaacaggccaaattcctcattagtttatgttcattgacacttttaattaaaattactaaaatataattaattgaaaggacggtggcacaaaatgaaaatattcttcatgtctgatattcatggttcacttcattatcttgaaaaagccttagcaagattcaaagaagaaaatgctgattttatagttatactaggcgatgaactatatcatggagccagaaatcctctccctcttggctacaatccaaaagctgttagtgagcttttaaacagctatagtgaacaaataattgctatacgtggaaattgtgacagcgaagtggatgagatggttttaacttatcccataatgtcaacttactctactattttatataaggataaaagactgtttttaacgcatggtcacgtgtatggagaagaaaatttgccaaggcttagacgcggtgacgtttttctttatggtcatactcatgttccagtagctaaaaagaaggatgacatatacataataaatcctggttctatatctattccaaaggaaaacagtccaaattcctacgccgtatttgaaaatgatttatttgaaatcaaagatttagctggaaacacttttatgaagctgaatatataaataaaattcaataaataaaaaagattcacaaataactcttttatttgtgaatctttaaaactgctcttatttaatcaactattttaaatatttgatttttcattaattactaatatttaaatatctaaaatctcatatattttgctaatatcaataaacgttttgagttaggaaatctatatttacaagggggatttattaattataggttttcaaacatttttatatcatcttctacattagttattccaccaattccaaagttatcaacaagaactttggcaacatttggggataaaaatgctggaagtgttggtccaaggtgaatatttttaacaccaaggtgtaataatgcaagaagtactattacagctttttgctcataccatgctatgttgtatgctattggaagctcgtttatatcattaagtccaaatacttctttaagcttaagagctattactactaaggagtatgaatcattgcattgtccagcatcaagtactctaggaatacctcctatatctccaaggtcaagcttattgtatttgtatttagcgcagcccgctgtaagtataactgcatcctttggaagtgctttagcaaagtcagtatagtaatttcttgtttttgctcttccatcacaacctgccattacataaaatctcttaattgctcctgattttactgcctctacaaccttatctgctaaagctataacctggttgtgtgcaaagcctccgattatttctcctttttctatttcagttggtggcgcacattttttcgcatgctctattattgctgagaaatcctttggttcaccgttttcaatatgttttactcctggataacctgttactcctgttgtatacattctatctatatatgaagcttttggaggaactatgcagtttgtagtcataagtattggtccattaaagctttcaaactcttcattttgtttccaccaagcatttccgtagtttcctacaaagtgtgaatatttcttaaatgctggatagtagtttgctggaagcatttcgctgtgagtataaacatctactccagttccctctgtctgctttaaaagctcctctatatcctttaagtcatgtccacttattaatattcctggattattcctagttcctatattaacctttgttatttcaggatttccgtaagtttctgtattagctttatctaaaagtgccattgcatctactccatactttccacactctaaagctaaggcaactaattcgtctgcacctaaagtatcatctaatgttgcagccaaagcttttgacataaagccttgtatattgctatcttcgtagcttaagttacgagcatgctttaagtatgcagccatacccttgattccataagttaataattctcttaaagatcttatatcttcattttcagttgaaagaactcctacagcttcagttttttcgtttaaatttacatttcctcctgctgctgatatttgtttcttcaattcttctttatatttaattcctttttctattctctcagtaaatatattttcatcaaaatttgcatttgttattgttgcaaaaagactatcaactatataattatctatttctttatttactaaatttaattttcttgcctcaacattgtataatgaaacaacctttaatgtatatattaataaatcttgttttttcgctaaatcttcagtctttccacatacacctcttactgtacaacccttgcagcctgctgcttcctgacactggtaacaaaacatactcattactctacctccataaaaatcatatttttcttgtctatgagtaaattatattatggactagaatttaattccgtaacaattgttacttataagaaaaagatttttaattttctcattaagcagcttataatatctaatttaaagtaatttttcaaatgccaatctttcactcttatcttctaaataaattattccgcagtatttaaaaccgttcttcttaagaagcttttgcattgataaattattcttatgtgtgtccactttaatactatgaacgtctttatttaagcataacttttcagcctctttaatgattacagatgctagtccttctcctttacaattagaatcaacagctatcctatgtataactgcaaaactgctgtaactaagccatttaccttcataaatattatcataattcttgtccccactaaacgaaatcactgctgtagcaacaattctgctatcctttaataaaataaatgaatcctctttttctatatcctcttttataacttcaaaattaggataattgttttgccattgatctattcctttttgcttaaaatattcttgtgattgttttataatattcattatattgtttatatctgacttactagctcttttaaattccatttcaatcctccatatacttaaaactttttccgaaaatattttttcttataactattatcatacttgatatctataaaagctactattatttttataaatatatataaaattagaggatagatacaatctacccccgagtttaaataaaagattaaattttaaagtaatacgtactcattttagtacaccttgttttgataatactctttattaaatctctatcttcttattttcttaactattaatataattgggactgaaataacaagtgccatagctgcagataaaactccatttgccacaaggagcaataatgattttactgccgttgaataacttatatgaagagcttttgcataagcgtctatgtataataaataaatcatcgccagcacgccgagtgtatttgtaaatgaacctgcaataattcctgtaactacaccagctttttctgatttcttttttattattttataaacatagtaagaaacaatccctattaaaacccttggtagtaccgaaacaactggattcataaatataaaggatgtgggaagtggtgtatttatagcttgtataatactaaaaattccaaataaaagtccagtaatagctcctactataggtcctcctactattcctcctattataacaggtatgtgcattattgtagttttaaatggtggtataggtaaaaagccaagccctgtggctcccaaaacaatagtaactgcaaacaataacccaaccatagttatttgtctagtttgaagtctgcttccataaatttttttaatcaattaaattacctcgctctcattccttttgtggatataagtcgaatttcaacttagtaaattcaatattctataaagtttataaatgtaattactattatatccctataaaacactgatttcctaaattttataataattatacttagttctcaataagtcaagactaacgaaaacaatgcatcccaacgtttacatgattatttttaatggtattatggttttaattacatataatcatatttatattactaaatattaagcactacatttaatgaaacaaaaagatagcacatgaaactatatctcatgtgctatcttttgttctacacgttttgtctgaaaatattgaagtgtaagcataagtccagcgcctaaaagcactattataaaaatcaccctccaaatcatattgattccgtaactctctatcagcttaccagcaccaaatattccaattgctccccctattgaggatattagctctccaaccgcaccaaatctagctctacagtttctaggactgttatttgccaaataaactccaaaattagttgctcctaatatttcccccatagtccatatcactgtagaaattataaatagtaaatagctgtttcctattatacttatcattccaaagcccacagcataaaatagtcctgaaaatgccatatttgtgagggttctaaagcgtttagttacatgcataacaaatatagtaagtgcaactactgttaaagcatttacactcatcaaaaatccatattttgatgacccactatagccaaacactttattcatcataattggcattgaaaatgaacattgtctataggctaagctgtatatcatatctacaccaaagaaacatattacaaatggtctttttaaaagtatttgaagaagatttcccttctcctctttctcctcaattctatcttcccctacatgctttactgcttttgtgtctggaattagtattaaaacaataattactgctataaaagatgttaaagcatctattataaataaaagtgagagataattgttaaacaaaaatcctgctattattggacctactgcaactccaaaatttattcctaaatataaaagagatgatcccatttgtctttttgaagctggaagtaaatctgcaaccattgctgatatggtaggtcttacaaagccattaaaaaatgatgaagctattaaaagtgcaaccgtcaaattaggaatattaataaatccacagattaatataacaattgccgcaaagctttgtcctaatatataggttagcttcctacttgacttatctgctatctttcctcctataaaggaggctggaactcctactactgaagcaatcatcacaatagttcctgtagtagccattgagaattttagcttctgtgttaaaagcagtgatagaaagggaaatacaaagtcccccaacctattgataacctgcaccaaaaataaaaaatatatactcttaggcagccccttgtagttttctattattttcatttcatccccctaatttatcattctgttaacatttcaactaatgtatttaatattataacataaatatagggggtattttaaaaaaagtgttattacggtatttttttataaattactcctagcttatccacctcgtcctgagatcttccaaaaaatcctgctatataccatccttctggtacggtgaatacttcagagtcatttgttttagtccctccttctaatacttgtcctttatttgtttcaaattttgcatggaatatcctatctgtgtttgtaccactcttttgtcccttacatatggatgcctttgttatatattctccctctttaagtgtaattgagttttcatctccacctgttcctccacttgatagttccgttccatcagcatattccacagataaagcatctaatctattttgagatctcatagttaatttagaaatcctgctattgggtatattatcaatataattaaagccaatacccccttttcctccaaagctttcacttaaggctatatcattagtttttgtataattaaactgagctattattggataatgatcagataactgcttgccacttttgtccacaaattttgtatcttcaagtctatacgaaagtgcatctaaagttagtgatttacttcctctgaaaagtattttatcaacaacctcaaaattagcactatttctatttgtctcatccataagtggttctccagtgcttggatatactccatttctatcaagcttcacccatgcatcctttaaattacacgcatcaactaaagcctgttttatattatcctgctgccttgtatatcttgtatttgtatcacccataactattacggcattgcccttagagttttcatttatataggctgctagttgctcaatgttatctcttctagcttcatagctcccttcatcatcacctgcatctgcatgaagagtatatatatcaacataaactcctggctcaaattcatattgtgaatacataaagcccttaggtgtaagctgatcgcttccatcagttatagtaccatatcttttattccaagttactctatcagtatcatagaaaggatactttgaaataaaattaaggccatctccaaaaggaacatttcccgaggtttcagtaagataaggtgaagttacatattttattaaatcattatgataagcaaaatcctcctccactgaagctatatcatagccatttaaaagcgggcttatttgaagcgtattagcagctggattactacttgaaagtccttctggtaaacctgcaacattatagtcaataacagaaaaagttttagcatataaagctactttagggttaattaatataaaagctcctacacaacataatgataaaattattttctttgaaacattttactacctccataaaaaatatgcattttttctacgtattaccatgcaaggtatgcataataaacactttaaaatcacttttaaccttgatataacataataaacacaaactttaacattatgtatataattccatattgaaatgatataatatataattataatactttaaaaaagttaatcggttgggaggtactcatgaataaaaacatacttttaaactttttttacagaaataaatttaaatacattatagggttaatttttgtctttctatcctcctacattcagacactatttccaaaggttttaggaaatacaattgatatactaaaaaaaaataatttcagtatgatatctgtaaaaaagaatattttgtacatagttttaatagccttttttacatttttacttacatatatttggagaaacttaataataggtaccggaagaacacttgaatgctacttaagagagaaattatttaataaattccaagaactttctcctgaattttataataatgaaaaagtaggaaacttaatagcttatgctataaacgatatctcagcagttagaataacctttggtccctctatagccatgactgtaaatggcttaactgtttgcctatcctccatttattctatgatattttcaataagcctaaaacttactttgctttgtcttgcaccgattccattcattgtaataattatgattaaaattagtagattaattcgtgcacgctttaccacagtacaagaaagctttggaaacatatctgacagagttaacgaaaatataaacggcattagagttataaaatcctatgttgaagaagaaaaagaagtagaaaactttgaaaaactaaatgatgctatggctatagcaaacttaagaatggtaagggtatcatcaactctttcacctataattgaactttgcttttctttaagtttttgtgcaaatttgataataggtggaaatatggttcttaaaggtaccgtttccctaggtgattttgttgcctttaacacttatcttgcaatgataatggcaccagtaatgtctattgggcgtattcttgtaatatttcaaagaggaatggcttctcttaaaaggttaaataaaatctttagtactaaaaaagatatactcgatggtgaaaaatcaataaatataccacttaaaggaaatatagagataagaaatttgagctttaaatacaaagacactgatatcaaaactctaaaaaacatcaatttatcaataaaaaaaggtgaactaattggtataattggaaaaacaggttccggaaaaagtaccttggtaaacttacttttgaagctttataatgtagaaaacggcagtattgcttttgatggtcgagacataaatgattacaccctagcatgtataagaaataacataggatacgtacctcaggataactttctattttcttctacaattaaggataatataaaattttttaaagatgtgtatgacgatgcagcagtagaaaaagcagcaaaaataagttgtatatacgatactattttaaaattcaaggatggttttaacacagttcttggagagagggggataaatctttctggtggtcaaaaacaaagagtatctatagctcgtgcagttataaaagatcctccaatattaatacttgatgatgccttatctgctgttgacaccataaccgaaacaaatattatagaaaatctaaagttatttagaaatgaaaaaacatcaataattattgcccataggctttctgctgtaaaaaatgcagataagataattgtactcaataaaggtgaaatagccgaaataggctctcataaagagcttttagcaaaggggggaatatactatgacatatataaagaacaatacgaagacaaaaaatgataaaaacttaaatagccttacacgccttcttcatcttgctctaccctacaagaaaaaaattattctttctgctatatgtgtacttttagtaaatgcagcagagttactaaaacccttcatactaaaggtctcaatagatgattttctagttggaaagagagtccaaagtggcttttattccatatcttctatgggctttttatattttggcgtagtagctctaggaggatttttttcaataagtgaggcaaatctaataaactcggccgctcaaagtataatgaaaggccttagaagttctgtatttaagaccatacagcttcttcctttatcctatttagataaaacctcctccggtagtctcataactagagctacaaatgatgtagaagctttaagcgaaatgtacacagatgtaattataagcttatttcaagatatttttctacttttaggaattatatatgctatgctttctcttaatatagagctttctttaatttcattttctgtaatacctattatgttttttttagttttttctttgaaaacgagaattaaaagaaactttgctaaaatgaaaagcttaataggtaaaatcaatggttttatggctgaaaatttatccggaatgaaacttgttcaaatctttacagcagaaaaggaaaagagaagagaatttaaagctttaaataatgaatacttcaatgccaccttatttcaagtacgcttaaatagtattctccgtcctgcttcaaacgtgttccaaaatttatccatagcactgcttctttggtatggaatggccaaaatcgcaaaccataccattcaaataggcgttttatatgcctttacaagctatataagacaattctttgatccaatttctgatcttgcagatagctacacaacaattcaatctgctcttgtttctgcagatcgaatatttgaacttttagataaaaaaattattcttgaggatttgcataaaggaattcctatgaagaaaattgagggagacgttgaattcaaagacgtatggttctcctacgataataaaaatttcatattaaaaggcttaaatttcaaaataaataaaggagaaacagcagcctttgttggagaaaccggtgcaggtaaaacaactataataagtcttataagtggtttttataaggttcaaaaaggtgaaattttaatagatggtgtcaacataaattcaataagaccttcagatttaagaaaaaatgttgctgtggtgctccaagatgtatttttattttcaggaaacataaaaagcaatataacacttaatgattttgtgccagaagatgttataaactcagcagttgaagcttcctttgcaaaagactttattgaaaaactacctaacaaacttaatgaacctgttatggaaaggggtaaaaccttttccgctggtcaaaaacagcttttatcctttgcaagagctatagctcataccccttctatttttgttctagatgaagctactgcaaacatagatacatatactgaaaagctcattcaaaaggcaatagaaaatattacacgtgataaaactacttttataatagctcatagactttcaactataagaaatgcagataaaatactagttatagataatggtaagattgtagaaatgggaaatcataatgaacttatgaaaaaagatgggtattacagaaatctagtatatgagggtatgaaaaaagagtgagtagctaaaaataaacttctcactctttttgatgtataaattgtttttcttacagtcttccaattaaaattgatagtactatatacagaactgaatatattgcaaaagcacatttatatattttaccttcaagtgccttatctctgtctggaacgtaaaatttctctgctactgattttcctgctgcctttattcctagtattatttcacacaataaatataccaaaataggaactataagtgcagaaaatcccattaagaatttagcaggaatatttacagatagttttgataatataactgatactacaaaattgcatacaatgaaaattccaatctttttaatgtaatcatatattctttcccaactgtagtcactatactttgcagttttataaaaactaaacattcttcttcttatatatacatcttcttttcccatagaatccattttatcttttagatctaaaataaagtctcctatgttctccactactactgttagtcttatacttttactgctattgttactattattataaacaattctaacccatccacctatgtaaggtattgatggaaatttaatttttgttatttgatcgtatttaattgatacggttcccttgagattcttatatactataccttcatctgttaatttaatatttatatttttaaaccttctgaacaatataaaataaagtaacagaaattcaagtcctataagcacaataacaaatataccagctcctacaaatatccctattgctgatggatctattcctgcgctgcctcctacgtctaaaacacctattaaaatcattccaacataaaatagcataaataccccaagcatacttccaaaaagtaaacccggttttcttaaatgctttctgtataaatattccttttccattcttaactcctaacttaattgctaatctttaatttacataaagatcattactttttctttagttacctagtatttaaaataatccttgaaagaaatttttaatagatgtccatgttctactaaaaaatcctttagcctcatcactttgtaatgtacttttcaacttgcttgctacttgattaagctgtccttttattttgctataatctaaattaaggttgcttattttatacattacatttgttattttgtttatgtcattatcatttaaattataattgtagttattcactacattttttactatcttttcagtttcatccttactatcaggtttttgttcaactacttccttctttacttcattcattaatccagcagctttatctttacctattttctgccctaattctcctgtagtaaccaattcttgatttgcagcttgtttattggcctcgcttatttggtttccacctttactagcttcaaaacctttcattattcctgtaagtgcagctgttcctgatacattaaagggtgctgctgccttaacctctgcattatttatacctgctgtaataagggcattcttgatcatatctgaattaacccaatatatattatatgtagttacatctaatccaccattttctgttggcttaacatatgaacaggatatagacttagttcctatctgttcctttgttgctacattgcctaaatattttctttcctcatctatatttacttgtattaaattcacctgatcttttgttactccaaaatatttaagcatatctgatttttgttgttcgcttaaatcacctcctactgtaacacttgtaaaagcatctgccttagctttaagtggcattgcagatactacatatgttagtataaacaaaaccaataatttactcacaatactcctaagtttcataatataactctcctcactttaattattagcttattatatatattacataataaaatacaaaattacaaataaataaaccatatttaattatatatttttataaatttatgttaatatataattaaaattttaatgtgtattaattttttctaatataaggtttaacttaatctagttttcaagccaaatatttcacatgaaaactaacaaaaggagagctaattatgtccttaattactaaaaataatttttctataatggtggtagatgacgaagagcacatagttgaatttttaaaaatgggtttagaggcagaaggctttacggtatacactgctttcaacggaaacgatgcagtaatatattcaagaaaattaaatccaaatttgataattttagatgtaatgctcccttacatgaatggctatgaggtttgttccttaataaaaaaggcctcaaacattccaattataatgctaactgcaaaggatgagattgacgataaggtcctaggtcttaatttaggtgcagacgattatatgataaaaccttttagcttcaaagagcttttagctaggataaacgcaagacttagaaattcattctcagagactttaaacaaagttgttattggaccttttttaataaaagatagtgctcacgaaatcatttataaagatgatattttatcactatctccaacagagtataacttattaaaatatcttcttttaaataatggaatagctttgagtaaagatcaaatacttgaaaaagtatggggctatgatttcacaggagaaaaaaatatagtagaagtgtacatacgttatttaagagataaaatttcagataaaaatcacaccataattcgtaccgtaaggggtgtgggctacaaggtggtgatataagtgaatatatcaatatttaaggaaaaaagcttaaaatggcagcttttaagaaggatgtttttgctattaatatgtttccttataattctagaaatatttcaatactttttcttaagacattatatatgcaaagataaagaaatgcttttagaatcgcgaataaacaatgtagctcacttaatgacaactatagactcagaggcttctcttaaaaaaaattctgggtatcttataaaaaaatctctatactttgatactacttcctctgttatagacaagaatggaaacgtacttctatttcacattaaggataaacatcctacctctcctcctataatttcggcctccgaatacaaggctataatgaaaagagaaggcaatttagaaggttatacaattactaaaaataaatgtggagagccacaaataactatatggcgtaaaataggtaatttaaattcacctttaggacttattcagttaaccactccttaccattctgcagctcaatttctgtacaaacaaatttacatctacatagtagcttgcgtgcttattttgattttaagtattttaattggaggaactttaataaaacataccttaaaacctttatatagaatagcacatactttaaataatcttacagtaggtgatttgaacaaaaggctttcagaaaacaacaatcaagttgaaatagatcacttagcaactgcttttaataatatgttctcacgtatagaaatctccttcaatcgtgaaaaggagctaaagaaaaaaatgcagcaatttatttcagatgcctctcatgagctgagaacgcctttaacctccatacgtggatttgttgaggtcttattaataggctcttataaagacgaaaagaaattaaaactcgctttaaatactattcttattgaaagcgaaagattaactgaactagtcaataaccttttaactcttactagattagatcggagtactcatactgaaatgacaaaacaaaacatgagtgatataatcgaagaaatttatcctcagctaaaaatacttgctaaaaatagacaagtaaatttaaatttatatgataataatgcttatttcttgggaaataaaaatcaaataaagcaggtcatatttaatatagttcaaaattccataaattacactgataaagaaactggaattataacactatccttgtctatagaagacactctatttattttaaagatatcagacaatggaataggtatagcttctaaagatcttcctcacatattcgacagattctttagaagcgaaacacaccgttcaagagaatccggtggatatggacttggcttatccattgcaaaatcaataatacaaagtcatggtggtgaaatttctactaaaagtattataaatcaaggaacctcattttatataaaattaaaaagaatctaataccataaatcaaggctataatgatatctcattatagccttgatttttcaacaattattttattaatactttacatttagcattataaactatgcaagcatttgtttaaacccagtaattacaaaatttctgtaattactactaccattttatactctttttacacttttctcagcaaattctaaggaaactttaataatactctaagaggtttgctgtaatatttaatgtgttctaagggaggtaactagtatgtttaaaaatatcttttttcatgatacttcttttaataaaattttatattgccttggcaccgtcataaatttaactgcttatggtaaaaatgctgaaactgctatagatgaatctattaaagttttagagaaaatagatgataaattttctgcttttaaaactttaagtgaggtttctaaaataaatagaactgctcacaacaattttataaaactaagttctgaagccttttcattaatagaaaattcaatatactatagcagattaacaaatggatgttttgatcctaccataaagccactagtaaacttatggaatataggtaaagaaaattttagaattccaaaagagtctgaaatttctacttctattagcctcgttaattacactgacatagttcttgataaaaaaaactcttcaataatgctaaaaaagcaaaagcaaagtgtagatttaggtggcatagctaaaggttatgcagctgataaggtaaaagaagttttcactaactataaagtaaagcatggaataattgatttgggtgggaatatttttgttgttggaaaaaaagatcgttcccataactggaatataggaattcaaaatccattttccgaaagaggaggctatattggaatattgaacctaaagaataaatcagtggtgacttcgggaaattatgaaagatactccatttataaaggtaaaaaatatcaccatataataaatcctaaaacaggttatcccgaagataatgaggtcttaagcgtaagtgtcatatctgatgaatctatagatggcgacggtttatctactggtctttacattatgggagtaaaaaaaggtattgatttagtaaattccattaaaggtgttgattgtatttttgtaacaaagaaaaaagaagtctatttaacaaatgatataaaaagtaatttcaaaatctcaaataaagaatttcaatttaaagaggtgggataatgattaaaaaaatttcaaaattacagatagcaagatttatttctcagttaatatttctttttctgctcccaggcatatttgtattagcatttagtcaaataggaattctatactctaatattctaaaaggtaactttgatttaataactctattttcttcaatctctatagccgtaattactttactaacaaccatcatacttggaagatttttttgcggttggatgtgttcctttggatttatgaatgatgttatatatatgttatccagtaaaatattcaaaacaaaatttaaagtagatgaaaaaacagataatcttctcaagcttcttaaatacattattctagttctcataggaatttttgtttggacgttaaaaaatagcaaccttaataactatagtccttggaatgcctttgcccaaataccgaaccttaagactgctatttttcagtattctctaggcttcataatacttggtataataattgtaggagctgcctttgtagagaggttcttctgcagatacctatgtcctctaggtgggatctttactctaacctctaaatttagattgtttaaaatcaataaaccaactaaaaaatgtggtaaatgtagattgtgtacaaataactgtgcaatgggaatagatctttataaatatcctaaggttaccagcggggaatgtatagattgtttaaaatgtctggatgtctgtccaagaaaaaatactcaaatgaacattgttggtgaaaacataaccccaacgctagctagttctattgcaatagcaacctttgcaggtatgtatgctggatctaattttatttcttcttctttgcctaatactactccacctatatcaactacaactgctaatcctcaagttaaatataaagatggaacttacactgctagtggtactggctttagccctaatttacaggtttctgtaacgattaaggacaataaaatatcaaatatagaactcttatctaacaatgaaacccctaagttctttgaaagagcctctagtgttgttcctgacgaaataataaaagctcaatctacaaatgttgatgctgtttctggtgctactagaagtagtaatggcattatagaagctgttcaaaatgctttagaaaaagctaaataaacataaaaagatgtgtgtacttgtaatatctacacacatcttttctattcatttcaaatctttaaaattatattttaaattttagaattaattcattcaatttcattgctacttctgcctgactttgcgacatcttagaaacctgatctgctgaagctgctacctcacttatagttcctttaacttcttctgagctttctgcttcttgttgttgattattagccatgttttgcattgcatcatttacttgtccaatagtagcctcgagctcctcagccatggatgcaatttcactagacatatcacttacaaattccgaatctttttcatattgatcacccatttgaatgaactttgaaaattgactttttacattttcatccataaacttcaatatttcgctgctattcttggataagtgttcaaatgctgcattaaccttttcaattgtcttattaattccttctaccgcatctcctgattgttttgctagctctttgacttcatttgcaacaactgcaaagcccttacccatttctccagctcttgcagcttcaattgatgcattaagagacaataaattagtctgatttgctatttcagcaatagcatctgccataattcttatatctcctattactttgccttcttcaatagcctttagtatactcttttctttttcgctatacatatttatcatgtcttgtgatgctgtttttccttctttacttacctttaaagctctatccttggattcactagcattgttacttccatcaagtgcttttgaagataagttattaacacttgtatccacctcttgaattgaagcacttatttcttctgatgctgcactactttcctctatgctcgtagctactttagttatttcattatcgatgcttatggcttttgaagctaactcttgacttgtagctgacagttcttcacttgaagcacttaattcttgggcatttgacattataactttaataagttcttttacattttcctgagctttattaagtgccttagttgattgtccaaattcatccttgctgtcataaaccaactctttagaaaagtcaaattcagcaagtctctccgatagctccttcattcctaataaaggtttgcttatatgtcttgctaaaactactcccataataactgcaaccaaagttgaaataatgacaaatatagttgaaatatttactgcacttttgtactgaaccttactactactataatcgttttttgcaaccttagcgttatattttatatctgcatccagtttctgaagcgcagcgtttctgtaaggtgttgtatgtgttttgaattcaacagaagcactcatatagtctcctgctttagcgtaagcaataaccttctccctagattgtctccacttagctaaattatctaggaactgataaaatagtgttctatcttcatccgtaaagatagtagttttgtattcctttattaattcattgtccttttgtactatgtcatcaatatctccaactatactgtcaattttagatttattcattgggtccataattaaaagtatatctgcccttacttcaataacatatccccttatttgatacaaaatattggtacctttcatatctacattgtatatgttatctaaatttttgttaacaccgttgatctttaaaactcctactacacccgctatagtagatataactgctacaaaaataaatgctattattaatttggtaaaaatctttaaatcagttacccttttcatttttccctccttatgttaatttaatttaaatattattactaatttatcgtatgaattttgcatcattcaagtattttgtcgtaaaaagtcgtatattaatttttgcataaaaaaaaagataatacctgttaatgcagaaatcatcttttttaatatatatttaatttatgtatttatttcactgcctatagtagcgggctttagttattttattgcttacaactgatagttttatactagatgtgcttactgtgagtttgacattataactttctttacaattttatctaccttatcaaaatcaatagtttgttcaaattcatcaagtctttctggcaaactttttatttttaataaatttttacatatgtacttagctaaaactattcccattataattgcaactacaatagaagcaatgaccaaaatacttgagaacattattgcacttttgtattgccctttaatatcaccataattataaattgtaatatctttgctataatctatatataagttaagcttattaagcattatatcactgtaatgcgatgtggtgctatcaaattccttaatagctgcttcatattctccagcaacaacataagaaataaccttatttctcgatgccctccatttttttaaattgacttcaaattcagaaaataactctttatctttttccattactataacttttttataattataaatcagcctatcatcctcttttacaagcttagctattttatcaataatattgtcacttttaacctcattagttgacttaagaattaaattagtatcagctttgatatcattaacatttgtctttaattcatatagaatattagtcctcttcatatctatttcatacatactttctaaatttatatctactttgctcatatctaaaatccccacaattcctgcaaatgcagatatcactgcaacaaaaataaatgataatattaatttagtaaaaatcttagggcttgccatacttttcattttcccccttttagttaagtcaatatcataatattgttaaatatagtatcgtaaatatttatccagaactaaatatcatgtcgtaaaaagtattatattggcttaaaacaaaataaaatatcgcttaaatatactatcttataaaactactaaagttataaatattgaaatccactttcctctactaaggaaaaactcttagcaatccctttagttataataacctttctatctttagtaataaatattgcctctacatcacgaaaccttttaactaattctatcccaccgtcagccccagctataaaggcagcagtagaaacagcatcacataacattgaattttcaaagataactgtcacacttaaaagttcttctttagctggatatcctgttttaggatctattatatgatgatacttaatattatctttttcaaagtatcttacataacttcctgaggtaaccacagatttatttttcacactaattgcccctattatttctcccctcttctttaggggattttgaacacctatacaccaacttttcccgtctggcttttctccaattacagatacgttacctccaagatttatggaagccgacttaacacctccacccttataaatatcaattgccctatctgctgcatatcccttagctattcctcctaaatcaactttcatatcttcgactaaaaatttaacagtacgtttataatcatttagtactaagttcttataatttacaagtgagagatttttctcaatttctttaactgaaggtactctttcattttcgcaaaaaatcccccataattttatgataggagctagtgatatatcaaaagcccccagagtttttttagaaaaattttttgcattttttattacgtgataaacatctttgctaagtttaatttcattttcaaatccaaacttatttagtttactgatttcactagagctgctataaaaattcatagccttctccaatcttctcatttcattttctaccttgaatagtacttctttcttatcctcaccatatattttttggcttatgatcgttcccatgcaaaacatttcgctgcaaacataatccctattcactcattttcacccttctcaagtgccttttctatagacttaagtattaccttgctactatttgttgctccagttatagtgtccaccttaagactctgagccttaaccaccatataaggtataacctcagctcttttacctctttcagttttatgctccaataattttatagaagtaattctgtgacatttaatttccacttttacctttgcctgtacaaaatcagcatcataactcccaatataattgccatccttaacttttgataacgcaacttctctaatttcagtatccctaactttattttgatagttcttcactgacacaaaatatcttacaccaaccactaatcctatagaaactaatactccaatagcagctataactaactttttcaccatatcatttcctccttatagagtttaaaataatttcaaatgactttttaagcacttcctctgagttcctattataaaatttctttgtataattctccttattcattgatatactggaaacccctagaatacatgaccataatgtaagacttatatccaaagaactatactcctctataatttccttcttgtccattcccctttctataatatcccttaataatctgagagaatattctccttcctcataaacctcattaaaaagctcttctcttacattttgattctttaaaagctcattattcttgtattctaaaatagctttaaaatatccatgatgaagtcttgtaaattctatatatacttctccaagcattcttatattttgtatttcactttcacttcttctttcctctaaaattttataattcatagaattcagtatcttatatcccctaagcattatttcatagtatatttcctctttgcttgtaaagtatgaatatatagtttttttagtaaactctgcttcctttgcaacatcatccattgttgcattatagaagccttttataaaaaatacccgttcagctgcatcaattatactaatttttctatttaacttttctatttctttacgcctattaatccccatattggtcctccttgatatactgttagtttactaactatactattagtatactagctgttatagaaaagtcaaataaaattagaggactctcctatttaaaatagtcaacaatcctctaataaaaaataacaagctaaggatattattttgatatttcacttcaaaatcctttagcttgttattttaatactttttattcttcgattatctcaacttctggataattttctccaaaggtttctatttccatagtcttaattctttgatcttctaatggcttatccgaataatctctcttaacagaaactattctatcaacttcctctattccttctgtaacccttccaaaggcagcataatctccatcaagatgaggtgaatcttctgccattatgaaaaactgtgatcctgctgaatcaggaaaaccagttcttgccatggatattactcctctttcatgctttaaattattttggaaaccatttgatgagaattctccctttatagcataaccaggaccgcccattccatttccatcaggatctcctccctgaatcataaagcctggtattactctatgaaatattactccatcgtaaaaattatggtttataagagaaataaaattactcacagtatttggagctatatgtggatataattctatttttatcttatttccgttttccatttctattgtaactattggatttttcatatcttattcctccatgtaatatattctacattagattattataccaaaaggaggtccttatatccatatttttaaattacttaatttgctgttcttctttttcaagtgaactatgctttgatccataaaagatataaactaatattcctacaagcagccaacctaaaaatgcaatccatgttattggcttaagcgtagttaatagtattatacagcatattattgttattattggtgtaaaaggaactccagggcacttaaattttctttccatattaggcattttgtatctaagtactacgacagctaaagacactaccgaaaaacttaaaagtgttcctatacttaaaaagtttgtaataatatcaagtggcaagaaacctgctattatagctgctgtaactccagttattactgtagctacataaggtgtgttatgtttaggatgaaccttagaaagtgctttaggaataagaccatctctagacataaccatgaatactcttatttgtccctaaagaactgctatcatagttgatatcattcctagaattgcaccaattccaactaaagccgatccccaccttattccaacactggcaagtgctgctggaactgcatcctctgtaactattttatcgtaatgaaccatacctgttaaaacaaaagccactgaaatgtacagtatacttacaactgcaagacaaattataagtcctctagaaacatctcttcctggattttcagcttcttccgctgtagttgaaatagcatcaaacccaatatatgagaagaatataacagaagctcctgcaaatattcctttaaatccaaaaggagcaaatggtttgtaattagtcatttttatatgcgtagcaccaagtactaaaaacattactataattgctattttcacaataacaattatgttatttacacgtgagctttctttcattccgtaatacaatatatatgtcaatataagagttataagaacagctggtaaatcaacaattccgcccttactcggcgacgcagtaataacctttggaaggactatccctgcatttttcagtatacctataaaggttcctgaccaccccgaagcaacagcactacacgcaaccaagtattctgacgttaagcaccaacccactatcatagctacaatttctccaaaagttatgtatgcatatgagtacgtactacctgatacaggaaacattgttgcaagttctgagtagcataatccgcaaaggcaagctactatacctgctagtaaaaaagaaataataataccgggtccagctttatgtgcccctgtacctgtagctacaaatattcctacccctacaaccgcacctataccaagtgctgctatatctttagttttaagggttttcttaagatgggttttttcagcactaaccatcatcttgtccagggatttttttctaaagattttcataatagtcctcctaatatgtattataaaatgtcattttattatataattaattaaacccatatgaaacttcaattttagctgtattttcatctaaataattgcattatgtttaaaaaagtcgcatttctttgatttttattcaattctttagtttatgatttaaaattctcaatatcgtaattattgttcccatttatttataaattaattattaaaggcattttatatgctttttttaaaatttaagggcttatttttatcaatttgttatcaatataatatttaccattgctattttttcaattaatcataataaattcagcctatttatattttacaaataaaaagagtcgtaccaaaccttactagtacaactctttttatacatatactaaagagcaaacattccaacaaataatatagctataacataaagtgctggtggaatttccttagcttttcctccaaatacctttattacaacatatgataaaaatccaaacgcaagtccatctgtaatagagtatgtcaataatattaatatcagtgttataaatacaggaaatccttctgtaaagtctgaaaaatcaacctttgttattggctccatcattacagcacctaaaactataagtactggacctgttgcaaaagaaggtatcgctgtaagtattggtgagaaaaataatgataataagaataaagctgcaattgtaactcctgtaagtcctgttcttccaccttctgctatacctgatgctgattcaacaaaagcaaccggagtagaagttccaagacatgctcctaaagctgatccaactgcatctgcagttaaaactttatctgcattttgaacatttccttcttcatcaagtaaacctgcctttgatgataatcctattaacgtacctatactatcaaatatatctataaacaacattgtaagtattactggaactattccaataactgctgcactcttaaaatcaaattgtaaaaatactggagcaactgatggtggaaaagatactatacctgaaggtgcctttgcaactccaaaaattatccccagtacatatataactaacattcctataacaaaagaaccctttatgtttttattataaagaactgctatcaataaaactcctataactgcaagtagcactgctggagacttaagactagcaagtgtaactaatgttcccttagatccaactattatacctgcatcctgaagtcctataaaagttataaaaaatcctattcctatgcttattgcatattttaaagtttgtggaacactatcaaggataagctgtctaattttaaatacatttaatactaaaaatataataccttcgattaatgatgctgcaagagctgttttccatgagaagtgtaattgaatacatatagtataagtaaataatgcattaaggcccatacctggagccattccaaatgggtaattagctacaaatgccattattattgttcctacaaaagaagctaaagctgtagctgtaaataccgctgcaacaggcatacccgttttactaagaatacttggatttactataagtatgtaggccattgtcatgaaagtagtgaatcctgctaagagttctgttttaacgttagttttgttctcagataagtgaaaaattttgtctaacatgattacctcctaaaatttgtttattattttattgggaaacaaagataaaatttaaaattatgtccttaaaaaaatgcaattgcaactttttaacttagcttcctacaattagtattgactaactataaaccattgtataaagcatatgataactaatttaaagaataaatatactactcaaatcatttttttcaatatattacttaattatccatcaaaatgatttagctatatatgtgttatacaaaagttaaccttaaaactattttaaaacaaaataagctccataaaaaattatggagcttataaatatctaaaatacttataaacacccatagtcagacaatttacggcagtccggtagagacgcttagaccatatttctaagcatatacgggtaatatgttattacttttcactattcaattattacagatttatattacaccatttttctatcaaaagcaacatttctttaaattttttatgaaattttgcacactttttttaataactatataaattttttctaattttgtacgttaataaactaaaacttaattttattaaatgctataaaatgaatggaaccctataaattataaaaatcggaagtgatccattttgaggaaaaataaaacctattatatctctgcctgtgtatgttttgctggactaatgttcttatttgcatcaatagtttccaaaaacaatcatttacttggtaataaactatatattatttctacaggattttttactgttgccgctatttttagctaccataagaaaaaataaaagcgataattttagctagattttcagaaaggatgatagcatggaaaaatgtaaatatcatcatggtaatttaaaaaaagatatgataaaaaacggattacaacttttaactaccgaaggctacgaagcattttctttaagaaaagttgccaaaatgtgtggcgtaagtcatactgctccatacaaacattttaaaaacaaggatgaattgatttctgcaataatttttgaggcaacacagaaatttaaaaaatctcttgaagaaacatctataaaataccaacatgatttcaaaactcaagtaattgaagttggcaaaagatacatacaattcatggttgaaaaccctgattattttaaagttctatttataaacaacttaaataataaaataatcatacaagataagagcatgctctgcattcaaggagactcttttaatccttttaagaatactgcttcaagttatttaagctccttaaaaactgagtatagtgataaggatttaaatttaagtattctttcaatatggagtactattcatggattagctgctcttttatcgaataaaacaattatatattcaggtgattatcttgaactagctgagaatatcatccgcaaaaatctaaattgtataacagattcattgtaattttgtaaaaacatcttaatacaataacaggcataattgtgttaattatgcctgttatttataatattgaaaattatcttgcttaattgtataattattgtaaggtatatattttacatactttattttaactaaaatcagggaattttgttaacgttatctgtatacgataacaattatgagagggtggtactttatgtcaatatctaaaaaagctaaagtaaaaaaatcattaggaattaaaactagtttggtactgtcattttctgtaattatatttatcactatgtccatactaagctttatgatctacaccaagtccaaaaaagcacttactaatttaggtgagaatgcattaagaaacagaattagtatggcacttacagaaatgcaggtactacaaaaccaggttgataaaaaaaagttatctcttaaagacgctcaggagatttttcgtaaaaaaatgcttggccctaaaagttcagataaaaaaacacgtccatttaacaaaaatttggagcttaatataagtgcttatatgtatgcaattgatagtaatggtatagaaacaatgcatccgaaaaaagaaggcgataatatttcagatatggttgatccaaaaggaaacaacatagtgaaattaataatcaatgaaggtattaatcctaaaaataaaggcattatccatttttattggaaaaatcctggagaaagttctatgaagcctaaaaccaatgcagttggttactttaagccatgggattggtatatcaatgtaggcgcatatgatagtgatttctatcaacctgctaataccatacttaatttcacacttattatagcattattaaatttgatagtaggctctggcttaatttatgtaattatatctaaaaaaatagatccacttaacaacctaaaaactgtaatgaaaaatgctgcttcaggaaacctaaaagaaagggtatctataaaacataacgatgaaattggcgatatatctcttgcgtttaatacaatgctagataaaattgaaactataatatctaatatcaagaattcttcaaatgaaatacaggataaatcacaaaatctaacttctacttctgaagaactctcatcttctactgaagaagtagaaaaagtaatttcaacagtttcaagtggtgccagttctcaagtatctgacttaagtgaaatttcaggactattagctaatttcaatgacaatattagtataatatattccaagcttgaggatgtaaaaaatgaaggcgatgctgccaattcaaagatttcctctggagaaagcgaacttaatactctatttaattctatggacactatgaaagaaaccttcgaatctgtagtaaaaaaaatacaagctcttaatgaatcgataaatgaaataataaatactacaaaattcataaatgaaatttcggaggacacaaatctattagccttaaatgcagcaatagaagctgccagagctggcgaagctggcaaaggtttttccgttgtttctgaacaaatacgaaagttagcagaacaaactcaaaatttaacaggcaaaataaccaccttaactgagaccataaataccaatacaaaggatgttatcttaacaacacataatatgcaatcatattttgaaaatcaatcttcttcagtaaaaaatgcttccatttcctttaaaaacatttttgaatccattaacactataattcctcttattaaaaattcatatgattctatgaatgaaattgcagcttctaaagatttaatcttatcaaaggtaaacactttaaattctgtagctatacaaaattcaaaaacctctgatgatgttactgcctcttcaaccaacctttcaaatgcatcccaagaagtagcattagacgctcaaaatcttaatattatagcaaataatcttttaaatactgtaaatagctttaaaatatagttactaaaaatagataggtagaagttaaaataataacttctacctatctattttttaaagtaatgactgtgagctccggtctattgaaaagtctaaatccaaagccgcctcttccgagtcctctactaactatcatatttgtattattctgctgaaatctcccactacagtattttggaaaaaatgtatgttccggtgaaaacacacctcctattaaaggtagtttaatcattcctccatgcatatgtccgcataacacaagatcagctttccataaatcatacacattaaagaaaattggattatgtatcattaaaatattataggcattttcatcagattttcctacactttcttctaaatcttctaacctaaattctatgttctttgattcttttttcatcatattcctataatatcttaacttcattgtacttccatataaatttattttcttatttttatataaaatctctctttttccattttgaataacatctacttttatcttcattaaatctgccatcatattattgtacttatgtggattaattagctgtaaattttgttcgtgatttccaacaataaaataaaccttatattccaggcttaatttttcaagcaaatttatacatacatcataattttcatcatcatttatcatatcacctgtaaccattattacatttggatttattatctttattctttttattaactttgaattcttctttccaaattctttactatgaaggtctgctaactgaactatcttaaatccatcaaactcctttggcaatttcttcgatgataatttgtaattaacaacctgaaagatattgttatctataaacaattttaaacttaacaatgtcacaactataattataactatccatattaacattaattttctctccgatttgtttttttgttcttaagtataacatattattatatatttaatcaaataaacttatacatgaaaattaaggaattttacatgtataagtttaatatattaaatcaaaatagatggacttatagtaatattgctaggtttatctgtttcgtgtgatttataagctactctcataaatttcatatttcctcttgatgttataactgttgtatctagagggcctaaaattataggactttcaaaggttaaaccatcatagacccactgtgctccatcattactcaattgtattataacttctacactattagaaccattgttgctaattgcaaacgttccactgcctattcctaacggtattggattagatgctaaaatactattcgaggtaatataactttccatagtataaatagtcaacacccttcctgaagaattagccgaaaattgaacatttaatctaggccataagctactgttaatagcacttattccagcaaaaccaactatagagccgctgtttaattcatctccatgaatcatcactccaagattggctacactgccattatgccattgacttgttatatttgataaatcaacattaataaattcatttatctcattagtcatattcgtaattcctacataattagtatctataataggttgagtattataggttacagtattaatagaatatttttgtaatatactataaaatttaatagattttaactgtgaattataattatagctcacatacaatttaagagttgcagataatatcgactcttcaattggaatagatgatatatcaaatacaacgattcccctataaatatctgctgtattaacgtttctgcctacaaaaataatatctgatgtgctgtagttcttcgttggagtcgcagaataaatataagttgtaccagttgcagcaaaattaaattcccccacttttttaccccctatagttaaaaaaattcatctcatactatattatgatttaaaaacattcaagttaacatattacttagcaatgttaaaaatttttttctgccttatttaaaattttctcttccaaataaaattttattattttgtttattttattattaagcgcatatactatattttaatagcatatttttatttaaatctatctattgctttttttggataaagtgctataatataattaagcgataacaattattaattaatattaattattatacgaaagtgaggcgaagctgttgtattaacagcgtatattatggtaaaagtatattcaacaacatcatgcccatggtgcaaaaaagcaaagtcctacttggcttctcaaaatatagattttatagatgcaaatgttcaagatgacatgaatgcaagagatgaaatgttaaatctatcacatcaaagcggtgttccagtaataaatatagacggaaacatagtagtaggctttgataaagacaagattgatgaacttttaaatttaaaataaataattataaggatataccatttaaaaaatggtatatcccaataaaaggaggcaattataatgaaaaaatatgtttgtgtagtatgtggttatatctatgatccagccgaaggtgatccagataatggggttaatccaggaacttcttttgaagatattcctgatgattgggtttgtcctttatgtggagttggtaaagatcaatttgagccatctgaagaataaaaaaaattgaacgagtagatattttattaatgtctcctcgttcaatttttattgtatacatttattgaaattacgtataataattttaataatataagtaatggaggtatttaatatgcagtcttctaaattagcaccatttgaagttcttcatttaacaaaaatattaaatagtgagataactacatataaaaaaattgattccgtatctaaaatgactacagacgaagatttaaaggcgttttttaacaaaatgaaagatgagcaaaaaaataatataaaatcaatacaaaactttataggtgatgagtaatcttatgggaggtacttttatgaaaataatagaaaacttaactggaacaggtgacaaaacacttacaaataaagatatagcgtcagattttatgatgaatttagatgattttatagtttctttatctactgctacttgtcaaactatgaacccacaattaagacaggtatttgatgctcaacttatttcagctataaataatcaacataatctttcagatatgatggtaaaaaaatcttggtatccagcatttgatgatgcttctcaacaattgaaaaatagttatgttgattcaaaacgtataatggaatcataaaattaaaacgccagtaaaaatactggcgttttgatgaggacaatatctatatatctttgattagaatattacattaaaaatatgtactatatatttcttttattaaaacaatctattaataattaaattttttcatatatgtatacaacttgtaatttcattatgtattacactattacaatagtacatatttttaataaaactgtaaacttcttctgactaatttcatactatactcatgaagttaattttcaggaggattatatgtactataataaatatgtatgtgcagacatatcatcagatgaaacttcaccttctaataaagacagtcgccaccatcatcataatactaataatcacaataataaccataatcacgaccacggatatgagacagatgatgattatgaacatgatataaattttcattcctgcccatttatgaattatctacccgtaatgtataatcaagctcaaatgaatgctgggaatccattttatcctatggtttctcaaggaacgcaaagtgtatatcctctctgtcctatgatgccgcagatgatgaactatccaaatcaaaattattctacatgttctagttgtggcaacagagattttgatgattatgatgatcagcaatattatgacaatgactatgatgatgattacgatagtgatgatctttatgataatgatgatggatacaggaatcatcataggagaaggagaagaagaaggagaagaagaagacctttatgtccttattttccatattgtaaaaatatgtggtggcataatcattagaatctaaccttatagttagtgtaacctacatttaaactataaatatcccaagctgatttctcttcttgggatattttttcactccaaaattatctttaattttttccatatcttaattgtttgcagtcggcttttcaatatatacaagtactataccaaaacacactaagataagagcagctaaattttttaattgaaggatattttcttttaaaaatattccagataaaagtacaccaaatataggtattaaaaaattaaaagccgatattattccaactttattatatttaagaagtgctgcccataatgaaaatgcagttgctgagagtactgccaaatatactagcagggatattgattcaacatgaaaacctgttaaatgcccaccattaaaaaatcccaagactgcaagaaaagccccacctataaaaagctgatagcctgttactatcatagaatctaatttctgtgttattcttttaccatatatacttgaaaccgaaagcacaaaagccgctgccataataaagccctctcccttaaatgaaaatgagaactttaagatatcagaattaaagttggcaactataacacctataaaccctataatacagccaataattttatttatattaagcttatcattcttatatataaaatttgcaagtattatactaaagaaagttccagtactgttcattatagaacctttagtccctgttgtgtatccaagccctacataaaaaaatatgtactgcaataaggtttgtgtaattccaagcacaaaaatttgcactatattttttttattaaaaattttcatattcctgtgaagtattatagatattataataaccattattcctgctaaggcaaacctgtatcctgcaaatacaaattcgcttggtacatcatttgattttatattaaatagtttgtaccctattttcacacctggataagcactcccccacaggaagcagcaaatagatgcaaataaaaccacaagttttttatcagtgaaaatttttttagaattcatttttaagcatcctttcacttatatcttatgtaaaaatcgctaaagatgaaatatcttcagcgatttacgtagaagttatcatataaatatgataacataatttcacatatattcaattattgtatacaccttttatttaagcaattaagcttgttcgagagcttgatttaagtcccatattaaatcctctgcatcctctactcctattgaaagtcttatcatatctggagtaacaccagctgctttttgttcttcttcattaagttcagcatgagttgtacttgaaggatgtataacaagtgattttgcatctgcaacatttgccaaaagagagaatagtttaacactatttataaatcttttaccagcttcaagtcctccctttattccaaatgtaaatattgagcctgcaccctttggaagatatttatttgctaactctttataaggactttcctcaagttcaggataatttatccatgaaacttttggatggttcttcaagaattcaactacctttcttgtattatcaacatgtttttgaaccctaagtgaaagtgattccaacccttgtaggaaataaaaagcactttgtggactaagcgttgcacctgtatttcttaaaagttgaactcttgcttttaaagcaaaagcaggtgcacctagatcagcatatataagtccattatagctcttatccggtgttgtaaaatcaggaaactttccactagctctccaatcaaattttccaccatcaactataattccacctatagtagttccatgtcctcctataaactttgttgctgaatgtacaactatatctgctccaaattctataggtcttataagatacggtgtaccaaatgtattatcgattataagtggtattttattttcatgggcaattttagctactgcctctatatccaaaacatttattcttggatttccaatagtttccccatatacagcttttgtcctatcatttattgcttttcttatattttcaggattatctggatctacaaaaacaacctttattccaagcttcttaagagtaaccccaaataattcatatgttccaccatataaggtacttgctgcaacaatttcatccccagcacttgccacatttaaaatagcataggtaattgctgcaagtcctgatgctgttgcaagtccagcaactccgccctcaagagctgctactctttgttcaaatacatcagttgttggattcattatccttgtatatacatttccaggttctttcaattgaaataaatttgctgcatgatcagcatttttaaatacatatgatgttgtttgataaataggtacagctcttgatcctgtagttggatcagcaacttgtcctgcatgaacctgtaatgtttcaaaaccaaattttctttcttcactcatttttaaaatcccctttttattatattttaacttcaatatctaaacctaaaaatatataaaattaaatcctcttcttagttgaagaggattttagctttctaaaattttataatcctcttatctctcaaaattaactttgcaggaattaacaccatacatctaattaaaaaatgctggttgttgggtttcatagggccagtccctccacctctcttgataagaccttatcataaatatattcaatttttcctactattcatatatgaatcgtttattttactttatgattaaattatatcattttatataaatctgtcaatagattttcaattataaaattaatttattataaaaatccaaaatattttgtccatataatatagttataacggatgctgctgctacaaagggtacaaaagctatatagtccattctatctttaattttaagtaatattaaacctattgatacaaatccagcaagtacaaaagatataaataacataaacattccaagtttcattcctaaaaatagtccacacataagtaaaacctcagcatctccgctgccaaacgctggcatgtcaattatctttttagtaataatatttattaaaacaattactcctgaatacaaaaaagcagcaaataaataaccgtaaatatgatttttataaaatatatttatagctataaaaattatacctgatattatacctggcagagttgtacacaaatatacatttgtcgtgtctaaatctataattgaaataataaataaaaatgaaaaaagtactatgaatttaagcgttattaattgatatccatacttgaggtatatcgccaaaaacataattcctgacaaaaattcaaatgcaaaatacctatatgatattttttctttacagtacctacatcttccttttataataacataactaattaatggcagaagatcataccacttaagcttattatgacatttagtacagttagagggaggatatataatagactctccctttggtaatctagctatacacacattaaaaaagcttccaaatatagttccaatgataaaaatagttataatcatttaactttactgtatctttttcttattttatcaacgagcctgtaatactcatttatttctttgtttagtgcacagctatttcttagcactaacttatctgtaagttttgcattttttccatttatctcattgtacaaattatctctcaaattttctatatgttttaacaatagttttacatttaccataataaacacctcaactgttattatttacataaaagtgtttattattcatattgaaaaaaattggttttattttaatttttctctaacagaatttaatttttgctccatcgatgccttcttatcacgtctatcatctatacttatggatgtaattactctttctgctccattttcaaaaggaatttcatgcatttttcttataaccctaattattgtatcaatttcaccttcaaatattgtacacattggagttaatttgtattttatttccttttcagctttaagtatattttcacatgctgctacatagctgcttaaactagtagagcctgttcctactggtattattgttgcttgcgcaatagccaatttaatcgcctccatatttttataaaattaaaactcttatgaatattatacctcaacttacaatagtttttttctcaagcctataattattctatttatataagcctattatttgcaaaataaataaggttaatgtagcttacttaagccataacattaacctcattattaaacgtaaaactctttgaaatcctctagccttaacatggccaattttcctcctgccttatctccataaacacaaccacagtcaatataaaaagtgttttttcttctcaatatttttacttctgttgtattttttattgattgaacaggagtgtgtccacatataatgttatatcctttaattttcttttctttacctatgttatgcctactccacaaaacagtttcttcaagctgaaaacgcagtatctctttgatactcaattcgctataaaatggtggaaaatgcaactgtgcatgtactaaaatattattatctacaaccttatatattggtaaacttttaatatattcatatagcttatcattaaaggacttacctctttttattatctcattaaaggttacttttcctccatttaagaaccataaatctggatttttatcttcataatacttttgatacatatattcatgatttccttttataagatatacatttttattttcatatatataatctagaatttttaaaggttctggtcccctatcaaaaatatcacctataatatatagctcatctttatcagaaaatctcactagtctaagcagttcagtaaacttattataacatccatgcaaatcacttaccacataccttgccataaatcgtctccctgattattgtagtatcttaagctctctactaacattatttaaaacttcacagcctgtttcggttacaactactaaatcctctattctaactccacattccccaggaacgtatatacccggttctattgaaaataccattcctacttgagcttctatatcagaattacctccgactgaaggaaactcatgatcttctattccaatattgtgccctgttctatgtgtaaagtactttccatatccttctttttcgattacttctctagtcactctatctatatcacttaatttcacacctggctttacagctttttttcctgcttcatttgcttttttcactgtttcataaatctttttcgcctcttttgatgcctctttatagaaaaaagttcttgtcatatcagagcagtaattattatatactcctcccatatctataactatagtatctccattgtttagctcagtgtcatcaggcatgtggtgaggatctgctccatttttaccatagctgcaaatagtatcaaaagaaagtttctctattccgtttttttcaaatattccttgtattactttagccatttctttttcagttttatctttatttatataatctactaattcctccataaccttatcatttatttttgaggactcccttaaaatttttatttcctcttcatcctttatcattcttacttcatctacaattggagaggaattaacaaagttcatatttgatttttccataagttcaattaaaaaatgtgctggccaatttttatcgattccaagcgtatcgtttttatctatctcatttaaaagaactggtattggctcttcactatcgtcataggttatgatttcactattatctaaccctttactattcttaaaaagactgttcatgataaaagtaaccttaccatctgtatttatatacatagctactaacctttctcctgaatctatagaagctcctgaaagataaaatatacttgaagctgaggttacaagcatttgattcaatttatgttttttcatattttctattactctttttattctactattattcacaaatttcactcctctttattatccttatgaatacatttatcaatataaaaataaccgccattactatataggagaattgtttttatactagctttatttccctatactaggcagttaaatcacgtcttatctatgtaataatcaaaggtgaatatttataagtggcagatgtccttatacatctatccacttaattatatatatcctaatatagtgttttgatgtattatccaccaaccttcaattctttattttttacacttgatactttcaatttctcaatataactctcgtcatcgctaattcttatcaaatttcctataaaataaggattcttagggatctctttaaatatagcaaaatttattaacatctttgctgtattaattttcttgacgtgtgtgtggccttttttaaaaactttatttgtatttattactagatagtcattacatacaggcactattacatatttgtttcttttatagatttgattcatatttatcaccttcatttttttaaatgaatacctaagttacggtattaaggtaaaatacaaaaatcatgaaattaactaatatttataactaacccctgcacaaaatattactttctatatatttattatacatttataaaaaatatttatccacaataatttagcaatataatgaattaatttttaatttggaagaagactactataggaacactatctaagacataaacttttttacatgtaaaggaggtttaaaaatgccaaaagaaaaaaagtatcaaaaaaaatctgctacaaataatcaatggtcttcacttcccgaagaaaattttgataaatctcaatctaaaggtaaaagtgaaaaatcagctttaaataatcagtggacttcaactataaaaaactccactgatgataaataatgagtggtagattatcccaaacactacaactcaaataaatttcttagaaaattaccacaacaaaagatgccatactttaacaatggcatctttttattatctgaagggtttctagtataactttatcaataaagctctaaacattaatgttttaaaaaccccacctattactattacccttttgcgaaatcatcatttcctttctcgttaaatacttctttccaagttttttctgcataaggtgcaaattcctctgctgtcttagttatcttctcatggaattcactgtcatgaagcatcttctctgctcctaaatcatcaggctttgcccccacctctttacatacatcaattataacatcagtattatcaatcatcatgcatggtctaagcatattcttattgtaaggttgtatagccctcagttttttaaagaatggatctctaaatgcatctattaggtgtcttccttttaaatttactgttgaaaaatgtgaaaatatacatggttcaacatcttctcttgaatttacatgaaaataatattttcctgctatacatcctccaacatatggtgcatcattgaaaaaatctatggtgaaatatggctttgtagctcttatttcccttgatctcttcccaagataatctctttgctctgctgtaagcatcatatcaaaatcaattgtctcaccatttacaggcataaacaaaaaataccagctcatcttagagcctttttcaattaacatatccgtgaattcatcactgagcaccgtatctatatttgtccttgtaaccgctgaggatactccaaataatatccctctctcattgagcatatccatagcttttaaaacctttttataggttccttttcctctacggtcatctgtatctttttcaaagccttctattgaaagcattggtattacatttccacattttttaatcctatcagcaacctgttcattaatcaaaagaccacttgtaaaaggagtgaacatcatatcattgtacttttcgtatatgtcaagaagataatcattaaagaagggttccccacctaaaacaataacataatatattccaaggtctcttgcctcctttatgattctatcaacttcttcttgtggaatatcatcttttttgctataacttgaagcataacagcccttacaatgaagagaacatctcatagatgggcttataagcataacaaaaggtatcttagtatcttccttttctaagtacttatcctttttaggtccagcataccaattagcatttgcaaaaaaattagtgaagaatttttttagacatttactatctgtatttgtcaaaatatcttgtatatacttgtgtttgcactcatcgttgttgtagtaatcctcaacaacagcgatttgttctagcgccactttatccttcttgtttaacttttttacagctgcaaatatcttatttacattcttttctggattcttgtcaagataatcaactactttgtttactatagcttgcttagcagccttttccaaagcattttttatctccattggaattcctcctagtaaattaatacatatgactaatatgaatgtccttaagttaaagtaataaatattaatcctatcatatacattatagtatttaggtaatacttttaacacatatttcctatacaactttttcctatgtaaataccttattccacaaatttattttacattataaggatatattacgatattttttttgatgtgacataattattatataaaaatacatcatttaaattgttatattaaattttttcatatataattatgtaggtattacttatatggagggcattacttatatgaatttaggcacaaatgataaattaccaaaattaaatactcactactcaagtttatcaaaaagattaatggcttctttcttcgataatgtaataatatcagccttatcctatcttttatctattattatttttattattatgactattttttccttcagatatttggatgagtttattaatcatatatacttaatttatttttcactacattttctagtagcatttttttattacataacaatggaaagctcctcttttcaaggaactctagggaaacttatcgcagatattaaggtagttaagctaaatggtgataaggtgtctatttttcaggctttttgccgcttttttattgccaatatcctattatatccagcatattttttctatgcacttgtactttataatgtctcaaaccaaataattataaatcattcctgcaatccatataaaattaattctttttatttttatggactaatttcttcatcattaatatacctcatatataaattagtgatgctaattaccatattaatctctaataaaaaacaaggtattcatgatattttaataaaaaccttagtaattatacgttaaaaagtgacagttcttgtctgtctctttttatatgtataataaaaaaacaagctaagcatcttattagaaaacttaccttgcatattttaaacaaaatatttcatactttttttctttaattcctttagagtatataaagcttcaaattcttttacaccacttaactttacaatattacatatagtattttcacaacttgctctattttctccatgaatcatagtatatatattatattgccacttactacatgatttccttttatagcaatggcttacttccttaaagcttgccatgattttaaccacttgttctattttatcctctggaaccttccataccacaagaacatttgatttaaatcctacatttgtatgtctaactatagctccaaatctgcgtagaataccctttttaaaaaactcatctatcttattcattaattctttttcagaaattccaatctctgaagcaatttgtttatatggttcttcaactataggaatatcctcttgaagcctctttacaatttttatttctaaaggactaagcatatcttcactccttcactttaaaaactgcatttattttaaatactttctctgccggtaattttagtatttcttcaattttaagagtgtccttaagttcttctaaaaattcttcaatctctttttctgattttgccgttatagtaaaccaaacattataatagttatcgcgttcataattgtgagtaactccttcatatctatttataaccttaacaacttcatctaaattctcctttaaaactcttagtgcacatagtacagtatgatatcctaaatttttagaatcaaatattcctcctattcttcttataagaccattgttcttaagctctttaacaatctgtatcactgtttcttcagttatattaagcttctttccaatttctaaaaacggtctctcagttaaaggaatttcagtttgaagcatatttaaaattcgaacttttttttcatccattaattttgttctcctcatactcattataaatacaccatgtgtcagaagccataatatctccattattataaaaggctgcacgcgccctacacccaccacatttatttttatatttacaagtgccacacttttccccatattccattgttctaagctttttcaaaataggactttccctccatatttctccaaacgatttttgttttacatttccagcagaaaaatttaaatatgcacaaggctgaacatttcccgtaggactaataatacaatattttattcctgcaagacatcccttcttaaatctagtcttaatattattttgctctgcaattctcacaaattgaggagcacaagtaggctttatttctatatttgcatgtgcttgctttaacattatctccttaattagattttcataatcattcttgcttaaaatttgctcctgaagctctgctcccctacccgttggcaccaaaaaaaacacatgatgagctgaagcccctaaattcgctccaaaatcggttatatcttttacttcatctttattccatttcattactgttgtgtttatttgaaacgaaataccagcctttttcaaattttctattccaataatagtgttttcccatgctccagaataatttctaaaactatcatgcttttttgcctttaaactatctaagcttatccctgcacgcataactcctgctttttttaatttttgggccgcctctaatgttataagcgttccattgctacctataacacatcttaagccaatttttgaagcatagcctatcaattcgtaaatatcatctctaagtaaaggttcccctccagagaaaatcattattttaaatcctgcctttgctatctcatctataagcttttttccctcagttgtactaagttctccctctgcaccctttccagaatctctatagcaatgttcacaatgcatattacacttattagtagtattccaagatataatcatactaaatcacctcaaatcaatccttcattttcagaaacacctatttcattatttgttaaataacacgctggatctgatgcccaaaaatcccctgtaacagcttctgctcttgttctaaaattcccattacatatagaaagccatttgcactttccacatcttccttttaatagtttcttcctatctttaagccctttaagaatggaatttgaataatcagtccaaatatctttaaatttcttatctttaacatttccaaagctgtggtttgacgtaaattgatcaggatgtacatttcctctatagtcaacatttgcaatagctattcctgaacgattacccccatttatttcaagaaatttaagaatatcctcttctttatccttaaatttatcctttgcttttaagtaaagataaacagcatctgcgtagttatccactgtcaatatttctactttatttccgagctcaagagttttatccataattaaatccattgctgctctggcctctttattagatatgtctttattaatcattgagcttcctcttcctgaatatacaagatgataaaagcacactctatcaatttcttcttttttaattaatttaaatatactttcaatttctccatagttatattgatttatagtgaatcttagtccaaccttttgtccaacctctttgcaatttctaattccttcaattgctttatcataagctccctttttccctctaaaatcatcatttttttctcctatgccatcaatacttataccaacataacttacaccagctttttttatctttttagcagtttctttatctataagcgttccatttgttgaaagtgtgcttcttatattattttttttagcaaattctataagttcaaatatatcctttcttattaaaggttctcctcctgaaaatattattacaggaactttaaaatcacttaagtctgcaattaagctatatgcttcctctgttgaaagttcatccttataggtttttccatcagaaccagcataacaatgcttacatcttaaattacaagtttttgtacaattaaaaactacaacaggtcctaaattacttgtagctccatttttctgattttttgcttcttttacatatcttaatttatctccgtaactctcacttgaacataaaagtttagatattcctatcatatactaactccttagttttaaataaattttctgtaaagtatatttacaaagctttgaaattattctttaatactttcactttacagcttaaccacgttttaaagagtataaaaaaaagcattgatttaagttaattccaaatcaatgcttttactatctaatttttagattaaactatctataccattagtttgactaagtgcgcttgaatctgtgctgccatttgctgtacctgataaactattcaatatctgataagcatagttattatttcctccaaagctgcttgttgtactatcactagaactactatcatctgaagcactgtctacacttgagtatgatgatgacatactttgcagtgcttgaagttgaagcataagttctaactccttagccgctgacgtttctgatgtaccagttttttgtgtactgcttgtattaacagctgatgttcccttatctgtttgcttttcaatcgcattatcaagaagcatcttaaaaagtgcatcattagaattcgagctaacttttgtacctgatataccttgaagtccacttgtttgcatgctttgcaatatttgacttatatccatataatctctcacacctctcttttatactatcattttgattctaccctttttgagaactaatttctacatattacactatagttaataaaactttatttattattttattttattttatttttatattttgccgtagtagcattttaattcattagtctctacaccaattagacagtaattgcaatttatacatctagattccttttccttaccttctttaaatgtttttacaatactcggctgaattataaatggtcttgacattgaaacaaaatcacaatctttagcaataatatcttcaatatcactaaactttcttattcccccaactactatcaccggaattgtaaccttattttttatttcccttgcattattcaaattatataaaaaatgcggttctggactttttactattaatttacctacatgttttactataggttttaaaaattcaggaatccttttcatagttggatcgcatttaagtatcatatcaaaaggaacttttcctctaattgttacgaatccttcttctgcaataccacaagatacttctattgcatttattcctgaattttcaagagctttagatatttttattgcttcttcaagcttaattccatctttagatgcttcatatccatttatttttgctaatattggatagtttttaaacttctgtcttgctctcttcattatttcacttactattctaaatctattttcagtgcttccaccccatttatccttccttttattcatatgtggtgataaaaaagatgacagcaaatacccatgagctaaatgtaattccactccatcaaagccagcctttattgctctttctattgcatttacgaaggcttctataatctcatttatcgcaacatccgttaactcatgtggcacagaacccctataaattttatctcttattggtgacggtgcaactgttggttttcctgttactttttcgcttgtttgtcttccacagtgagctatttgcaaaattataggcacatcatacttatggatttcattcaccatatttttaaaagaagtaatattttcatccttatctagcatcaacatatttttagctggtgactttccattttgcataacacctgtatatcctgtaataattgccccaacttcgccttgtgcaagctccatatatttttttattaaatcctcagttggctttccttcactatctgccatgctttcatgggttgcagaacgtaaaattctgtttttaagcttaatatttcctatcttagattcttcaaatacctttctcattaaactctcctcttaataaaaagttatatatctattatttcaaactttttccttgcattcaacttatatacaataaattttcatcacccttttaaatttttatacataaactataattagttatgttttatggaggtttaacatgtatataccagaagatcaaaatttttgcccatacatgagagaagatattgatgtagatacgagacagcaaaatcaaaatctatgtagtcaattcgctaacattcttggtgcaaaggttacagaatcaaagccgagatcttgtagtgttgaaagagatagagaaaatctacgtataactataatggggaaacctctaactacagtagttaaagcagaattttcttaccaatcccttgatgcttcaggcagagctcttaatgtaggcgaagtggctgttttacaagaggaagtaaacagatttataaccgtacttagacgaaacggaattgatgttactgcaattcacaatcactggctatatgatactccaaaattaatatatgttcatctgcaatccatagaaagaccgcttgaatttgcaagaaaagtagctgaagcccttagagttttaagataaaaaaataggcttacagttatactaaaatgttaagtatagctataagcctatttcttatcttctaggattggaaaaacttggttctgtaggattaggatcttgaacatatctgcctggcgtagacaaatcaaaatacaatttagaatcctctgttacaccaaaatctttattagatccttcgtttttaactttatttaatgcttctctaaacaatgcattatgcgcttcttcacgatttagaagaaaatctatagttcttctaacttctttatcattaatctgacggtataaatattcgtatacaaccttagccctttgctcagatgctatattagaaagcaaatctgccacaatatcaccagtaactgaaacataatttgctgtccatggctcacccgaagagtttactaaaaatggtgtcaatcctgaaagaacatgactttcaacttctccgactcctacaacttcatagttaacactatgtccgtttaataagtttattgtttctgcaactatctccatatggcttaattcttctgtaccaatgtcaagaaataaatcctttaatgcctgatcctttactctaaagctttgagataaatactgcattgctgcttttaattcaccatttgctccacctagttgttcctgcataagaactgcatattgaggattttctctttctacttttacttgcattccatttaacaattgtttttcgtgtttaaacaagttatgccacctccatattttatttgcctttatattttctgattaatcactatatttatgcattttttttacataataaaaaaactccggcatactgctgaagttttaacatatagcatctatagactttaatttgaatttttaagtactctttgaaggtttgttttagcatactgattattgggattacaatcaactgctttattatagtaattttgtgcctggttatagtcacctttaaattcataatccactccaagcatgttatatgcctcagattttgatccattatcattaaccattgtcaaatatttttgtatactaataattgcctcatcatacatctttaattcagtataagaatttcctaacaaataataacttttatctaaatttctatcaagttttatagaatcatttaatatattcactgcattatttaaatctttattttcccctttaccatcaatatacatagctgctaacatattcattgcttgagcaagtgtctcttttccattttcctgtcctctatataccttccacttcccattatcattaactacatatcttctataagttatctcaatatctctattttcataattgttatggttattctctgtcactgtaaatatacccacatttttataacaagtaccatctaatttgcttttaccatactgttcattcctactaattttaaaacttcttaacgtgtttgtcttcgattgaatatttaatagccttagaaaatcatgttttgaaaaattcctcttactctgattacacagtgcgctatacgccgcttctgcattattattctttatatatctataataactatcaagtactttctcaggattccctttaggtgtacatccaagtaaactcaatagcagcataaaaatggacattatcttaattataaaaattatttttcttaacacataaaaatctcctcactaacgatctgccattaatattatacaattttatataggttaaaattccttatatatgttgaaaaatcataaataatcccccaaaaaacaaatataagtgagtgcataacccactcacttacactaattatttaggataacttttaaaatagtcactgctgataattttatccgctatattaagtccttttatagcttcatccttatcattcttattcttattcttagcatttcctataaactcaccattagaccatacagcatagctttcatttgtatttaataaattacgtcccattgctgtatttagatactcgtttttatctattcccataagatataaaattgttggcatcaaatctatttgtccacccgttgttgttatctcttttccttttagagaactattgtatacaataagtggaacttccttatgattgtcaatcatccaactttcagcaccttttgtagtttctacatcactttgataatacttatgaattccacaatgatctccatatattactaccatagtattatcaagtgcaccactttttcttaaattatcaaggaaaattcctatttgtttatcttcgtaatgtacactttgaagatatccaccaagatacgaactatcaagctcgctatttattttaagttctctatacttagttggtaaatcaaaaggagcatgccctgacattgttataacataattataccatggtcccttacttgcctctaccattggctctgcctgtctcaaaaagcttccatcactaagtcctagtcctatattttcatcatccttaaatccagttgaatcaactatattttgaaaacctatggacttaagagcgggtttccaattccagtatgaacctttatcaccatgcatagcctgagtgtaatacccctgtctttctaaaattttaggaagtgaattatagtatttattatcaggatatctaaaaaaagtacttcccgtggatacaggataaattgaagtatttgtcataagctcagcgtcagaggtagttccttgatttacctcctcattataattgctaaaataaagactgttttttagcaatttatttaaatttggagttatctcctgaccatttacacttttatttataacaaaattttcaagagactcaacctgtattacaagcaaattttttcctttaaacattccactgtattcattatcaggtaagttctttttatttttattttgaaaccaagtcttaatttcctttttctcctcggttgttaattttaaacgcttagaatttttgatgtaattataaatatccaaataatgatatcctattggagatgcattacaaattgttatacttggtttccactttatttcaaaaaaagtttgttccacatcatatttatttagtgtattcactttaaaaggaacatatatagtgtatattgcggaaactgaaaataatactaaaaacaatacaatatttctagaatgtttctcatagatttttctatttataatactaaaaggtactataacaaataaatctacaataaataaaatatcagatttatgtattaaagaaactatagtactagatagattgtccaaatttcctgtttgatttaaagaataaagagttggaagagaactaaatcctctatagtaccatacatctattacaaacaaaatagataaacataaattagaaaatattaaaaaccacatacgtgatctatttttgaatagataagaaaaagatacaattaacactataaaataaatatatatgtatgcatgtgatatctttgtatatgatgtcaatacttgttcaactgttggtttttcatagcttatagcacttataactaaaagtgatttaaaaaataaaataattactgtgtaataaaacagcttgcttctccataaaaaacaagctacctttttaaaattttctacgatactttctttcttagccatttctctaacgatattaatgtgcactaaaaaatcacctcataaatttgctttatcttttgtaccctacttccctgtttaaatagttcataaaaacactcttcctataatactattttattattaacaaagtataactatattcttataattttataaattccactcagtattatatggagttaattcaataagctggatattgcatcacaagtagcccacttttaaatcaccctttaattaattgaacatataatatagcaaagaacactgagaaaggatgggacaagtgaaactaaaaacaaaattaataattatgattactattatgatagtaacctctgctatactatgtttaataggtataataggcgtttatagcattacaaataaagtaaactatttaaacaatacaacacttcctaaggttaataatgcaataaatgcagatagggatatgtatcaaacttcaattgatgagcttctgatattttacgctactcctaatagccctgattggaataactatgttaaggatattaataaaaatataaaccaaatcaatagcagagtagatatatataaaaagcttgccagtgaaaatgaattgactttagtaaatgatcatataactgcaagaaatacgtggatttcagaaataaatacaattattgatcttcttaagaaaaatacccctgaaagtcgaaatgaagctagaaaaacacttgaacattctaaaatagacttcaataaggcaagaacaccgttaaataaaatgggagaagtgtctaatgacagctttaagatattaaaagaagcacaaaatgaagcagcctacgtaagaatatctctcatattaggaataattattagtacaatttttatcacaatacttggaattataactttaagtcaaacagttactcccatgaataaaatggtaaaattcttaaataaagcttcaacttttgatttaacctccaataaagatagttccaataattcaaaacacttcagttctgaaatgaagataatgtcctcttctttaaaaaagatgatagaaaatttgcgaagcattataactattataaaggaaaactcatttaaagtaacaacaacctcaaaaaatgtttctgatataattaatgaaacctcttcttcagttgaagctgtagcaaaatcttcaaatgagattgctcatgctgcaataaaccttgcatcaaatgcagaagaaggagcagagaaaattgaaaatctatccagggagatggatgaggtagctcacagcactgagcttatgaagcaatatatatctgaaactaaaaaagcaaatgaaaagggttttgattgcattctccagctgcaaaatgctgtagacaaaaatattaaagctgctgaaaaagttacaagtcaagtttctgctctagacacaaattctaaagaaatcaaaaaagtaactgacgcaataaaatctataacctctcaagtaaatctattatcattgaatgccgccatagaagccgcaaaatctggtgaagcaggccgaggatttgccgttgtagctgatgaaataagaaaactcgccgatgaaacctctaattcaactaatgaaatagaaggtactttagagaagattcaaaccatgatatctaatgtaaaatcagaggtttctgacgtaaagagcgttataataaccacacaaaatgcctcacaaaatacagataaagcatttaaatctattgcttcctgtgttgataattttattaatcaaatagatatacttttagaaaatataaagaatatagataaggaaaaaaatgatgttgtagctacctttgaaaatgtatctgcaatttcagaacaaacagcttctggaacggaacaaatatctgcagccgtacaggaacaatcttcaaacctagaacaaataatgaagtctgccaatgatttaaaaacaattgctgctgaattagatgctttaattaatgagtttaaagtttaattattcttttaaaaaaagtgcctctatttagaagcaccttttttaactattaacttattaggatgctttaaactaaacacatataatcgatacatatgattaacttactacacagctgtactcttagattaaaagaaaaattatctagataagctttaacacaattacacatactattagtatttaaataaaaagtaggaggttttaaaaatgggaaacaaattagttaacagcttatctaaaattactacctcatcaaaagaagtaacttcagatatacttgttatgaattttacaattgtgaacgcttttttaattggaaataaaacgcagtgggtacttgtggatacagctcttgaaaactcagctgattttatacttaaagctgctgaaaaaagatttggtaaaggtagtgtaccaaaagcgattattcttactcatgggcactttgatcatgttggttctgttataaaactctctaaactttggagtgttcctgtatacattcatgaattggaaatgccatatgtaacaggcaaaaaagattaccctctagctgatcctactgtagatgaaggtatggtagcaaaaatttcacagaccttccctcatacaagtatagacataagctccaatgtctctcctcttccttctgattccagtattccttatatgccagattggaaatggatacacactcccggtcacaccgatgggcatatttctctatttcgtgaaaaggatcatgtacttattgtaggcgacgctttttgcactacaaagcaagaatccttgttatctgtaattacacatcatgaagagataagtggtcctccaaaatatttaaccacagattgggcaaaagctaaaaactcaataatatgtttaaaaaatctaaaaccacttatagctataccaagccatggtgaagagctgtcaggtgaagaactaactaaacatctagaacttttaattaataattttgatgaaattgcaaaaccagctgaaggacagtttgtaactaataaataatagtaaaacctatagaataaatttttctataggttctattattatttcactctactttctttattgcagccctaagtcttaggaaatcctcttcagttgtcataagtcctgcactagctctaactagactatacctttcaggtaattccctattcggcacaatataatttctgtaaagcctttttctctcatattcatctatattttttactttttcaattaatctatataagcagaaagtaccgcatcttacacctatcttattttcttttaaaatatcacaccctacttttgtacctacatttttaaaatcaaatacaaaggttggtgttctatttattctaatatcctgatcctttggatagtacagctttatattgctaagatctgataaatatttatatccaatttcatttattcttttgttatgctgattcatattttcccatccaatatcttcatttaaaactctcatagcttctgctacagttacagctccaagcccattaggtgttcctgcttctaaactaagaggtggctctttatatataacttctccccttttacctatataaactatatttccaccacctgtaggtgctaacccaatatgtgaaagaacatcctttcttcctgcaagtacacccgcaccaaagggagcatacattttgtgtccactaaaagctataaaatcacaatcatctaaagttatcttgaaatgcggagctatttgactcgcatccacaagcaagtatactccatattttttgcatatcttataaatatctctaagaggagtaagatagcccgttaagttagaagctccgcatattgaaacaattttaatttgtggattcctataaagctcctcttcaatgctgtatggatttatcttattgcttttacctgtgttaaacatttttactcttccggaatttttaaaccaaggaagcatatttgaactgtgttctatgtcactaataagcacaccttcattacccataaatggatataaaagagcaaatttatttattgaatcagttgtatttgcagtaaaaactactacatcatctttagttgcatgtagatattctcctataacccttcttgagttttcataggaatctgtactcattttagctaaatagccagttcctctatgaatactactgtaattttcaagaaattctaaagcttttttcataacacttttaagaggaggagttgttgcagcattatcaagataaacataatcactttttagtttctcaaagtattttctataatccattattaagccttcgtctcctaatatttttcaatcacatattattatatgaacaaagacctctaatggttttgattataaactttgttatactatattattgcttttcaaaaagctactgtctcaaattaatatataataataaaggatttctataaccaattttacttagttatagaaatccttaaagcttaacaatttacacatctaatttttcgtaagtattaaattcttctaggtgattttcatttaaaacaattactcttgctccttttataaaaccctccttgtcataacaattgaaacctgtctttcttccgtagcataaagcaattccatccaaacttccccagtaatcattagtgtgatcatgtccaacaaacacacctttgacatcgccaatttccttaagcttagaaaacaagccggtatcctctccctgacaacattcattttcattcctttcgccaacagcttttccactttgccaaacctcatactgctgttttaatggaatatgaaaaaacatgagagaaggtattctcgtttggaagcatttttttaaattatttgccgtgtcttcataccaagctatttgctccttttctacataaccatatccatcttttgtatagctacctgaatcaagcatgtacaaattgtatactggtttattattttcatcctgaataacgatattgtagtctcctgctttatcgctaacagttgaaaatttatcgctaagattatacttatatgacatataaatttccatttgcctttctctacttacttgacaagcttcactatcatgatttccaagtgtaactgcccaaggaattcttctatcctccattggctttgcaatattatctatgacacctttaacttctttttcaccgttgcagtaccttccatcaacgcaatctcctgttataacaaccaaattaggcttttctgaatcaagtatattttccataagttttattgtatattcattctttacagcatgctcatgtaagtctgtaaattgtacaattttaaattttccttctttaaaagcaactttgaatttttgtttgatttccctacttccacccttaaaaattctttgaagtaaaagtattattgtttttaatatttccttcaacacttatattctcaccccaatacttaattagtttataaatatatattaactctttactattaagtagaggttaagtgtactttttataatttattttaattattattgtggattatacattgcccaattatagtatgcctttactggagttaccccatcatatgcaccaagccaagaatcaacaccaattcctggccataaattcatcataacttttccaggatgtgttggaatattactagtcgccctatatacttcttttccatcaactaaccaagctatataattttgctcccaaatgtagccataggtatgaaatccctttgatgcatcaaagcctaatttataaagatattcatgctttccaacaccatttgtataataattaaattgtacttctgtagtgtctttccctaaaaattctatgtctatttcatcccatggattattgtcagaaggacctgtatagctgaaaaaagaagaatctactccaatatgttttgcaggcttcatgcttactctataaagtccatagccatatctattatttgaacggtactctccacctgcataaggtattgctccaccttttgcatctttagttatagaaagctccattccattattgaaattaacattactagctctccaagtgcaattaaaaggattaccatttgtccaaccatcagactttgcccaaatgtttgtattaaaagatttcaaattatcaaaaaatccagttgtacttgctgcaaacgtattcacaggcaatacagttgctgaaacaaaagcacccaataataatgaagaataaattattgtttttattttttttcttaacatactattacctccatattttaattaatattacataaataagtatacattataatttgtattttttccacctatatatgtaattaaagacaaacaactcaaattttcgagttatttgcctttaattataataaattacttactttaaaactgtgttatatttaattgtaaacttagcttgagggctacctaagaatacgattgttccattttgaggcaatttagcacttgtacttcccgtaactaaggaatcatttattaccgccccattgctgtcataaactgcaaatgctgcattttgtggtatatccacattaatttccttacctgcagcttcatcgccaattttgtaccactcagcatatccatctttgttaatagtacttgagaatgtgccatctattggcaaagtttttaacgcatcttgatctatataaatacctccatttgaacttaaatattccagattattttttttatataatttataatcctgctgatctcgtgacattacacccggtccatctaatatagccactgctaaatttttatctgctattttgtctactcctaaatagccttcaaacccctttgtaaatgcaatcaacgccattggacatcccatcatatattctactgaagaatacttttcgtttaataaaacgtacctttttccagatcttttttcccacgctttcgccacattttcttttaatttattaccatcttctttttgtgctatatatagattttccaccgtttgacctaagtacttcatattagaatagatagtttcctgaaggtatatcctcccatttctctcagttacaaatttcatactagttgatccatcactagatacaaaacttcctcccttagtataaatataagtttgcataggctggttctgagtatttaataaggttaatttacctgcatcatcaattttcgcattaataaagcctgaaggtgctaaatatgaaccttcatactttttaatttctgaagggactgctgtttcttgtggtggagtaaaggtcttatctggtatgatatttttaattactcctttttcttttaatgcagttaaaagcaccctctctgccattacctcatcatacgtactaagtccacctgaactcactacagccattgccatattttgttctggcaaaacaataaagccgctgtgatagaattcactatccccacctttgcataatgctttaatgttatattgattaaatggatacaaattaacactatcccaacctagtccataggctagtatattatctttcccctccggccaaatacctcttaagtattctttattctccattgcttttaatgctttttttaaaagaattccatttgaatttttagtaaaagtatttgcaaaagtgcacaaatcttctgcacttgaataaactccaccggcaccaaaactatttaaattctctacaggtaaagcattaggtactccatcataatatgtttttactaatttatttctatcaaatttgctagcaggcgttttagtgttgttcatcttcaagatatcagtaatattattagttatataagttgtataactaacccctgctacacgctccactaaaatttctgcaagagaaaaaccatcattacagtatactgaataagccccaggatcagcttttaaacgttgtttagataactgctttaaaaaagtatcatgagaataggtatcgttatccccaaaaagaatggcattagaaaaactagaccccattaatcctgatgaatgatttaacagcatcctaactgtgatttttttgtatctcccatctgccattttaaattctttaatatatttagtaactggagcatcaagttcaattttcccctcatccactaatttcattactgctgtggttacaaacatcttgctgacagaacctataccatacatgttatcagctgttacaggtttattatcttcctttgaatatacacctgcattaccagatagtacaatctttccattgtctattaaagcatattgtacacttgtacttccgtaatccttatttattagggttgatgctttttcatctgctacagcttttgtttgagaataattagcttgcgaagtacttttaactttattatctaattgttgagacttgtctacgtttggtatatgtacctcttgtccatctaccgttttaagtgaaaaatctgatacaattgagttattttgtgcattaggctcaaagattctcatcgaagtttgatttgcagcaaaaactttcattggtggtatactaattaatgccactaacaagcaagaaactaggcattttttcattttcattttaatttatactcccttcttttatcctataacaaataatatatatatttgtatattattatattatcatacattttatgtaattcacagctgtatcttttaatccttgcaatattcttcaagccaaacttttgcttctagcatccatctatgcggcattaaaatcatattattatctagtacataccttatatatgctaaggacgcatgatatattgacttatttaattctttatttaccacatcataatatggcggtgttccactttgatcccatgataatttatcagacacaaatagtgccatttcataattagatgcaccatttcttaatgttgtgtgatattttatgggtaacactattctcttatcactaattttaaatatttctttcataaaaatagcggagatgtaatattgtctgtagtattaattattttaatataatctttatcatacagtaaattcataactccaccactcttctttattatctttatccatatatcttataattaataattggaatgtaacccaaagtattgttaataacaaatcaactttcactaatcaatgcactgatttgattgctattattataaggcaaaacgcctcaaatctttgagacgttaaaccttaatatatcatagaaagtaagaattaatatcttaatttttataaatatcatttgcagatatttatctttatcttaaattattataataattgttaattgaaagaatgtaagaaccagatccaaagccagccattgggatagacccaaagtaatctgaattattccttgtaagaagttccggaatcaaatcaaaatttgcatgtgcttggttcgtaagccagtctatcaaaaccttagattccttatctttccccatgttttttaaagctgtagctactcgaagatcaacaaatgcccactcattagaatcgtaatctccaccatcctgatttctcatatatcctggacttcctgatttcatacgaagagttctattaaacgaatcaataattccagttgctaaggaatctttaggatttaccaaaccaaaattaattgcttctaccacagctgcatcatgataacctgttccttccgctattttttcaagagaagaccctaaagtattttttccagtaacattggatttcacaaccattttatttaataccgcatccttaattgaatctgctttttcagtataaagttctttcttctgcttatctttattcaaagtagcaagatgcgctgccgccttaagaccattgtaagttgtgatgttagtataagcaaatctctgacgaataccatttccaactttatacggtgtccaatgttcctcccatatggatgaatccggttgcattaatccgtcttttgaatctacaagtttaactaaaagatctgcatcatgttttgataaagtgttccaatatttatttaagaaagtcttatcacctgttttcttcatataactgtctgcagcccaaagaactagtccccatccatcagtctcgacgttgtaaccgttatcattcttgtcagattcctctgttccatttccataataacgacaaaccgaaatagcataattagttcctaaatctacacctagtccgtaaaccggagctcctttatttgtactttcaatatatctctggtaataatttttagtaggattagtttcatctttacgcatatcagcattaagcataaacttaagtccttcttttgcttcttttgtatgacccgatgcaagcagagcctgaatagagtaaattccgtctcgtacccatgcaatgctccacattccaggaattaaacttgcaagaatctgaccatgacttttcccatgttccctgcattgcgccatcttaagtacggcagtagactgtctatatacagcttgttcagaagcagataatcctttaggacctatttctccctgatgccattgattccaccaatttttctcgttttgtaacaagttttccggatttttattattcacaaggtagttcacatctttgctcaatttcttttcatttccatcttcagtaagaccaataactacgccataccatcttgaagtaccttttttgaatacatctccacactgatttctattttcgtatccacagaccaaattatcagcctttaaagtagttttatctaaataatgtccacccctatttgtaatctctactggagaattttctcctattccagatgtataatgggaaccttcttgatttatattcttgtaaatagcaatattgtctcctttatattctttcaaatatccttttcttttattgtaataggatctttcctctttgttatcctcattgccacctaggtttaaattttgctcagagtatagtgaaaaatctttttggtcttgtccattatttgtagcttttactaacatgactaacattctagattccttatctcctgaaaatggagtaaaataataagactcaaattgaaaatttccatccttctgaactgtattaatgatattggttccgtttacatagtttacagaagtaatcggaactcctgttaaccaagtactctttccattaatcttatatccaaaatatgcatctgacaaataattttttgtggatgtatttgcatcataattgctatatatatgcggctgaaacctattcaactttcggtctttctctgaatatgtagccgctgcaagtccattagaagttgttaaattttcaagagagtgatgtatattaaaagaagtttcctctgccattgtccttgagggggtaatccctactattgatgtggaaaatgtaaatgataaaagtgctaaagctactttctgcattatactttttgttttcaatctaatcatccctttcatttaatttttaacaaagcatctaaatattctattatcacctcttttcatacatacttactttcaatacaatttcacataatagcttgtaaaaacttttaataatgtatttatctacattatagtacaataaacgtttacagtcaatatattacatttatgttataaaatattgtattgtgtaaagtgtttttagaattataattatatatgtataaggtatttataacttgaagctttattaaaaactccaattattttgaatcttagcaaaatttctaacatataaaataattatttcaaaaaataaaaaaaaacgcctcaaattcttgagacgcctaaactttaatttggcaggggcagtaggaatcgaacccacaaccgacggttttggagaccgttactctaccaattgagctatacccctatatttaactttacaataatttctataaagtcgctatcaacaagtaatattatattatattatgcacaagctgtcaagctaaatttgtaattttttatataaaaaataattttccttaaaccaatttctacctcaatcccaaataacacttgaaagaaaatcattatacctttaccagtttcgatttcttctgttaaagttccttctccacctaatatagcttttacttcctgatagttttgctttccatttacctcgtagtatttttcctttgatacttttaccttattattactaagcttatattctatcttttcagttgctttattagttgaaccactatatactagggcataaacatgtaaaaagtacacgtaacgatactatatatctgcctcctgaatatctttgttatcattatttattgtacgctttttaaaataattgccgttttgagctagacctttatccttgttttatccctaagctccttttttaatattacgtttcctaacttatctaacgctaaggtctcgtggtatctttcgtattctgtgaaatactcctctattagtttcgcaacacggatattattagaggaaggggagaaacgttataactataagaacaataagaaatatgatagataaaaagagcgtaagttccgtaaggaaaacccgttaagagttaattcgttaataacctgattaaataccatctaaagccgtgtaattacggcgctagatggtttttttatgtcgttaatactctcgcgcgttatacgagccctcagtccttatacagaggtaaacgaggataataaaaagagagagcctattttactccctcttctatatgaacattatttccttacttgccttattaatcgcttgttacgatactctgatataacgttaagttgttgctattgaggtatggtttaatagttccttaacaagttctatattatttccgttagcctcataagcggttacggcgtagagctttctaaatgagtgagtagaaatatactctagccccaaataatccgttactatctttaaagccttttggatggctcttacacttagtcgattaaacaactcttcttctacttactttttttgaatataaagaaatttaacattaatcctttggcaactgcatggattacagcacttatatactggttgtaatatccactaaattctcttgttgtaactattcttttgttaactacaacattgaaaataatttccaaaaacatccatgcaactaaagtgtaagcaagacttaacagaataacatgtttatcaccccatttttgggctgttagataaacggccgctcctataataccaccaattaataaatttagcataaaacccaatattgctgacggcctattataagtaacaataaggctgtttagttgatatgcactataccttccaattccaaaataaataaaaatccgtgaacaaatttctccgacaatagtagaaacaatacctattaatcctgcaataataacattagtatcgtttaaagcttttttgttctccatgttttctcctccaatataatatcgtgttataaatataatttttatatagcttttgtacttttgggatatctattcactcttaacaaaatttatatttggggtgtggttgtaacaaatagaagctcttttactaaatactcagaaaaagatatttagtaggcgttaaaatgagagtaattataaacaattttacgtatcaatttgaaatctacgttgaggagattataaaaaggacgggtatagagactctatgtaagaagtgtgaaagcaaaggtcgacgaaattaccaactcaagaataaacaaaaaatagcggggctgataactcagctattgtattatatccgataataaatcgactttcttatgactatctattaaatatgaggtagaaattgttttaactttacaactttacaacaatttctacctcaatcataaatggcacttgaaagaaaatcattatacctttgctatttaagatagtttcctgtttcaaaggaagcatatccatttgtaaaggaaactgatatataaccatttttatcattatcatttccccacatatatgttttatttatacctttaccagtttcgatttcttctgttaaagttccttctccacctaatatagcttttacttcctgatagttttgctttccatttacctcgtagtatttttcctttgatactttcaccttattattactaagcttatattctatcttttcagttgctttattagttgaaccactatatataacttctatgtatgaactatcgctattcttccatctatatattccagcacttttttgtgtagtatctttttttccttctcctaatattttcttagtttcatcatatgtcattccaatttttacttttaaaaatttttcataactatactttcttgaagataaatctttatcctctgcctttgataaactgcatcctgctaaactcactactgtaaatattcctaaaattatagctgtaatttttgttttgatgtttttcatttttcccctctcctacttcctaatttatttcttttattaaattactccctcttaaaatttaagggggagtaatttgatacatattcaatttaggtgttttttataaactgactataccattttctacatagttcgtcaagttatttaatatattttttaaattataattaaaacaattcaaaactttttccaatataaacttatgttttagttgtttttataactttttaatatgtattcagtatttttttcaccaaattttgatacaataatcttcttatattcacctctaagttctttatctatataccttttggctcctatacagcttttatcaaattttataaactcatagctcttctcaaaatctctattgggatttgacacaattccaatttcatttccattttttaattctattgtaaatccacattctttttcacctctcctgttttcagcttcaacttttaaggtttttatatcactgaacatatacatattttctttaaacaatctcttagtatatactctattactggttattatattataagaattgtaaaagatcacaatagcaactatgttacaaacaagctgaaaaattatacttttcatagctttatgtttaattttacagcttttaataatatataaagaagcaactgttggtactatgatactaaaaaaagtatatgcaatatagctgctgggaggtttttcatagaaaagtacattcgtaagatttgacttataagctggcaacttattcccaagccatagtgctaaaaaaatatcaacaaataaaattatgatggtatataccaaagtagctacaggatgcttgtacttatagctgctttctaaagctctagcttttctttcaacatctaatttttctgcttctcttgttaaatttattaattttcgtccttttcttcttttgctttttttcattaaagttattcctttcttagtaaaacattcattaaaatatagattacctagtgccttttgtcaacattttaatttttatctaaaaaataaagcatagctctcttattaaatatcattacagaattctctaggagacctgccaaacatcttcttaaacgcacgaaaaaaagatgaataatccttaaaaccgcattgcatataagctttagttatggcatcccccttttttatcatatcttttgaaagaagaagtctcttttggagcacatagttatgcagagtatatcccgtttcttttttaaatttgtgcataagatagtacttactcatgtaaaactctcgcgctaaagcctccgttgaaagctctccttttaagttggcatttatgtactttaatattttttcaatttgcttatcatatctaagagtttcttttcccgttaaatacatattttcaagatggactctatttaaataaattataagttgaataaaaagtgaattactgaatagcttgcttccaaattcctttgatttaagagactgctctaaggaatttataataaacttcatattatcctgaagctcagttttaagtcttacaaggttaaagctcctctcccttgcaagtttaaaacaatttgaaagatcacaatcctcgtaattatgcttttttataaaatcagaatttgcccatataattattctttcatacactttagaagaatcaatgataggcttatgtacatcatgattatttacaagaagtatatcccaaggtttaagctcataggcttttccctctatgagatatgtaaccttgccagatataaatattattattttattaaaatcatgataatgaaattcaaagctttgactcttcctatccttcaaatgaaaaagctgaaaatcttcattaagatagccttttttattatccattttaaaacacctcaaaaaaatcatagagcattttttgcaatatatcaagcaatatatacactattcattgttaaaatttcgtatataataaatataggttttctagttaagtttaaataaaaaaacaatatagcactttaatatggagggttacaaatgaaattaaaacaacttttacaaaacatagattacgatttaataaaaggggacattaatataaatatagaaggaataagctataattctaaaaaggttaaacaaaattacgtttttgtttccattaaaggagcaagatttgacggtcatgatttcataaaagaagctgcacaaaatggggctgcggcagttattatagatgaagattttcatgattcaatagagaatacaaccttagtaaaagttaaaaattcaaaagtggctttagcttgcctatgcaatttattttatgaggagccctctagagaacttaacttggttggtgtaactggcaccaatggaaaaaccacagttatacattacataagagatatgcttgaagcctttggcaatagcactggtactataggaactcttggttatgagttaaaggataaagaaataaatgtagaaaaaattaatcctactacgccagaggctttagagcttaaccaaattttaagggactttatagacaagggtgcaaaaaacgctgtaatggaggtaacctcttctgctttaatgaagcatagagttgattattgcagttttaaagtaggcgtatttacaaatctttctcaagatcatcttgatgaacatggcactatagaaaattataaaaatgagaaaattaaattattcaaaatgtgtcctgtaggtgtaataaatctagatgacaatattgcaggtgaaattattgaaaaaggaacttgtgaatttttcacctacggagttttaactaatgcagatcttacagctagcgatatggtttataagcctaattccgtaagctttaatgttcattacaaaggtatatcctctaaagtcaaggtaaatgtacctggtgaatttactgtgtacaatgttttagctgcaataggaagcctactttgcctcggcattgattttgaaagtattttaaagcttgtttcaagcataaaacctgttttaggaagattagaaacaataaataatccattaaataaaaatataataatagattatgctcatactcccgattctcttgaaaagcttcttataatggctcgtgaaatgacaaatggcagaataataacagtatttggctgtggtggtgatagagataaaagtaaaagaggtcttatgggcatggcagttggaatactttctgattactgcataataacctctgataaccctagacatgaaaagccagaggatataattagagatatagaacgcggcatgcaaactataaattcatcttatgaaaaaattacggatagacgctgtgcaattaaacgtgggattgaaatcctaaaagaagaggatatactaataatagctggaaaaggacatgaagactatcaaattattggagataacaaagtacactttgatgatagagaagttgttaatgaattactaggataattttaaggcataccttttataaatggtgtgcctttttttacttattcaatataaaaatacgaactattctataaatcgtgtcaaatattttatacataataaaatccattcacacgcctgtataatagcacttctgtagttttttcctcaaatttccatactaacattaatattattttttataaaaatgttgattattccataaaaaacgagtacaataattaacgctgattaaaattgttacattcggttttaatttgtcaaaaaataatatattcactgatatctttgttgtgctggatagctgtaaatagctatttattgctatgtctaaaatcaacataataaactcaggaggattaaaatgctagaaagaatattcaaattaaaagatagaaacacaaatgttaaaacagagataatagctggcttaacaacatttatgacaatgtcctacatattaatggttcaaccttccttgatgaaatcagcaggtatgaacgccggtgccgttgtagttgtaaccgctttattatctgctgtatgtaccttacttatgtccttttatactaatctaccttttgcccttgcaccagctatgggaagtaatgctttctttgctataactttagtaaaaggtggtgttgtaacttggcaggaaggccttggaatgatatttctctcaggagttatattccttctattaacagtacttggtcttcgtgaagtcatagtcaagataatacctaagaatatcaaattatctataggcgttgctataggtttttatattgtgctaattggttttggagacggaaacataatgagcattgtggatggctcaattaaaatgggaagccttaaaagccctgcaacactgttatctctaataggactagctattaccattgcttttatggcaaataaaattaagggagctgcactttggtctattttaataacaactttaattggtatacctatgggaataactaaagttccagcttctcttatatctatgccaccatctattgcaccaatcgcttttaaacttaatattttgtcagttttaaaactaagctttttccctattatatttacattttttataggtgacttcttctcagctcttggaactatacttggagtttcctctaaagcaggactattagataaggatggtaatttagaaaacatacagagaccttttcttgtagattcaatttctgcaatattagcttctttatttggttcaaccttaattacagcttacatagaatcagctgctggagtagaagaaggtggtcgtactggattaactggagtaattactgctttatgttttcttcttactttgttccttacacctattgcaactatgattccatcctctgcaactgcacctgtacttatagccataggtttaagcatgatatccggaatcaaagatattgatttttcagactttacagaggcttttcctgcttttgcaacaatagtatttactgccttcacttcaagtatatcaaatggtataagtattggaataattgcctatgcttttggaaaacttgtttgtggaaaggttaaagaattacattggggaatttatgtgctttgtatcccattggttttatactttgtatttatgtaataatatataaaagacatatttcctagcttggaaatatgtcttcttctttatatcttgtatttatttatttcaccttgaacattaattactatttgagttaaagcctctgatgcctcaacaatttgtttcattaaagctgattgttcttctgaagctgctgcaacactctgtatattgtctgaagttgcatctgatgaactcgcaatacttgaaacattatccgtcatgttatttgaatttatataaattccatctacctcactaacaactttatttatattatctgaaacgttccttacagaacttacaatttcatcaaaggagtttcctgcattctttataagctcacttcccttttcaactgcaaaagctccatttttcatagattctatagtgctatttatctcacgctgtatatcttgaatcaaaattcctatttcatctgctgctttactagattcacctgcaagcttcctaacctcttctgcaacaaccgcaaacccctttcctgcatctcctgctctagcagcttcaattgcagcatttaatgccaacaaatttgtctgagaagatatatcatttataattgaagttatgttgtcaattttctttgatttatctcctaaaatacctaccatgatcgaagtttcattaacattagatgacattttatttatctcttcaatagcctctccaattattttatctccattttccgctgcttttgatgcagaatccgaaagagaaaaagtttccgaaatgctatcctttatttttttaatagctgcatttattttttctacttcacctgatatttcccttgtactatttgcctctaattctacttgtcctgaaatatcctgcattgttaccgcaacttgctctgaagctgattccgtttcttccgcactggctgtcaattcctgcgaagttccaacaatactatcaagattcattccaaaggttctaaatacttcttttaggttttctgccattgtgtttaaatttcgagtcatacttcctaattcatcttcagaggttacttctatagtgcttgtaaggtcaccttcagaaattttctttgaaagctcatttacctttactatacttttagttatgtaattactgtatatcactatagtaattgataccaaagcaatcattacaacacttaatataattaaaatgtttaataaattgctaagtggtttatatatttctgcttctgatatagttattgctaaaacccagttagtttgtccaagagaagtataatatataagcctcttatcacttccatctctgtacttactgcttccacttttaccacttagtatttcctctgatatatttgagaatttactatcattctttatggtttctttcataactttattactacttactcccgcaatatattttccatctttagttactaaaaaggccctgcctgtattccctacttttagattatttatcatagcttgaagcttatttaaatttatatcagcagtggtttctcctaaaaaattattatttttatcataaaaggaaaccgctgttgtagacatggttacctttgttgtaggatcataataaggtgctgtccagtttaccttgctatttttactgtctttataccaatcttgattaggataatcatagtcagatgtcatataactgtctgtatacactgctttactcccatcattgtacacatatggtccaaagtattttaaatcacttctaaatttccaaggttcataccagattcccgcccctaaggtatcttcatttatcattgcatatttagaaagtaaccctgaatagtcattattagctatagtaaagttatcagcctctatagttcttgcaagtgtttcagccactctttgatgagcctgaagcttacctgaaatagtttcttttaattgatttatattatttgttattttagaatcaatctctttagttaacatatttctagaaaaataataactaatagacaccaacaccattaatataactattataacaggcaatactgataccaaagttcttgttctgatacttcttactttcattaagcgcccccactttcattgaatattttaatcacactatattaccgtttagaattgcatgtaaaatatatactattatatcttatattatcgaaatttgtatttacgtttttataattataatatactttttttattacattcaatggtaatttatgctttttagtatttaggctacacataataaaaaatactcaattcaaaacgcctaagctattttgaattgagtatttctttaaatttatcataatccttaagtgcatcaaaggctggttcttcctcaatgtcactaacatattcactgtcataacttaaagtcaattttaagttttcacaagcaccatctttatctccgcttttcacaagacatattgccttttgaaagtatatttcaggatcttcaggatcaatttcagataaagtgtcataacaacttaatgcactagaataatcagtcttttttctatacatatctcctaaagcaaagtaattccctttatttttaggatctgctattatatcacttttaaattcctttatagcaccatctacatcattgagagctatataacatttttccatataatagcttgcctgtatatcactcgaatcaactattacatattttttaaaataagttaagctcttgctgtaactcttttctttatataagctcaaagcttttccccatatggcaactttatcagttgattttttttcaagtgctttatcatagtatttctcagctgctttgtaattttttaatccaaacaaagcagttcccttattgctaagctcctctgaagaattaggtgtttgttttaaagctaaatctgcatatttgtttgcaagtttatacatcttaagattgttatatgcccaacttatattatttaaggtaacatcgtaattaggatacttatcattaacctttaataatactagtaatccatcctcatttttatcttgagatacaagcacatatcctttttctgaaagggcaaccttatcatctggatgcttcttcaaataatcatcaatttgtttcattgcttcagaatatttcttgtgctcacataatattttgattcccactgtgtcaaaactagattttgattttaaatgttgtaagtctttcaaatcataactacatccgcttaaacaggtagctaaaagcattaatgctgcaatttttttcttataattaatcatatttcttcctttgcatgtggtaaaaccaaataatttaattggccctactataatatatttatagttaattttaccagaatattatattatatttacataattatatcaagtattttttaatttaattaaatttattttagaaatacgcattacagttacataatttattttacaatgctatgactttctattataatattttagaaggaatttatatatttataaacttatggaggttactatgaaaatttataataaacttgtaagagataaaatacctgaaataatagaaaactcaggaaaaactttcgatatacattatgctaaaaaagaagatttaacagctttacttgaagcaaagttattagaagaagcaaaagaattttcagaggataaaaaccttgaggaactagctgatttaatggaggttgttcttggtttagcttctgcacttggattttctgaagaagagcttatgaaaaaaagaaatgaaaaaaaagctgaaagaggcggttttcaaaaaggtattgtgttagaaaaagtttatgagtaaagaaaaagcttagattttttatgtctaagcttttttaactccatatacttcctcatgttttttttctagtctttccttgtaaaattttatagttcggtaatctataacatccttgaaatgccttataaaggctttattatgttgaaattctttaagtatactttttatattataaacctcacctttatcttcaaaaaactctgaggctgaatttacaaaagcagctcttggatttttagcaattttcaaatatgctttcttatcccaattcaagtagctttttgtagatttatctcttaacaaatccacagcattcgatgatttactataaaatttcttaaaacttaaatatatctcatcttcatttatagataacttaatttgtccattattataaaaagcaagcaaaagtggcatcttataagtcttcgacatagatgtagtttctagctttttaataaaatcgtgagcactagtcttaataagcttctcttcttcctgatcaacctcatctatagcttttaagaaaccaatataatcattaaaaatatttactttagcattagtcctaatattattataaatatcgtcatccatatatttatacatttcatacctacttggaactctttctagttgttgttttatcctataaaactcttcctttacaatctctgttattttcttctgagcttgatatattctcttaaacaaatcaataagtttaaaatcaaaatccacaatgcaaccttctggatactcttcttcctttggaactgattttcttatattacccatacttttcacatcgccgcttaaaagatatggaactaagtttgcctttttatagtttcctatgaaatctagtacatttaaatatttcttatcacaagattttctaagtccacgtcctaactgctgcaaaaatatagctgctgattcagttggtcgtaaaaacataaccatatctatattaggtacatctaacccctcattaaacatatctactgaaaatattactttaatttttccctgccttaatttctctaaagcctcttttctacccatagaataactcatcgaatctccacttaaaacagcgcaagcttctattccattattgcagaaatattctgccatgtaatttgcatgctttctgctagagcaaaaccccaatgctttttcgctgttatattttctgtaatgacttaaaattaaatcagcacgtttttctatcataaatgccttctctaactcttcttcgttgtattttccatttttaaaggttatcttactataatcagtttcatcaaatatcccataatatctaaaaggtactaaccatcctttatttatagcttctttaagccttacctcataaacaacattgtaataacatatttcaaatacatctttattatccattctttcaggtgttgcagtaattccaagtaaaaactttggagtgaaataatttattatattttgataatttttagcagcagcatgatgaaacttatctattacaatataatcgaaataatttttttcaaaatactcttcagctaaatatctagcttgtcctaatgtttgaactgttgcaaacacaatatcacaatctgtagccttatcacaaccactaaaaaatcctgtagcgctgtcttcccttacacttttaaatgcattctctgcttgttctaaaatctcctgcctatgtgctacaaataatacttttttaaagcttcttgagtcaaatgctgctaaatatgtttttccaatacctgttgctgcaaccacaatacctctatcaaagccctcttcccttgattttttaagttcatacaatgcttctatttgagctgccttgggcgttggaaattgaattacattttctttttccttatcctctaatttttctatatctgaaaaaactcttggtcttctccaagtttttgaatatctttgaagttcgttatcatccactatgattgtatggtttaaaaacaaatcttcaaaggttcttttatattctttaaaatcatcactatgtgcatcttttgaaattctataattccactcaataccagttgttaaagctgatcttgatatatttgaagagcctataaatatatctccaccagtttcatattcaaatatatatgctttagggtgaaaagatttattaggtatgttgtaaaatctaaggtcaacttcacctttaagttcatcctttaaaagatataatgcctgaggctgagttatattaagataatttcctgttaaaatccttataggaacacctttatttacagcctcttttaaattcttaacaataagtttaactccagattccattaaaaaagctattattatatctatagacttagcttttgtaatagaagcttttaattgtggaagaagatgattagtatctcccgttatacagtttaatggctctatatccttgtaagttaaattatgttttattgttgattctttgttcatagcatcttccctctctataccttccccctcataattaaccttctaaaagcagcttcaaacctttcatcatcctctgaagttctctttcttggacccttcatgtggttctttgaagaagctcttcttgcctttttagctatatgcctttccataagcattctatctatattatcattttcatacaactttcccgattgatgaatagcataggcgccttttccaagtgccatagctgccacaccataatcctgcgtaacaacaacatctcctctatggcaaagattaataagtgcaaaatccacagcatctgcacctgctcctattatcttaatatcgctgtaagtagaatttaatatatggtttgtatcacataataatgtaaccggtattttcatttcttgagccaccctctccacaatagaaactacgggacaggcatcagcatcaacgtaaattttcattcatatcacatccatttaaaatttaaatatatactttactatatcatataagactgataaattttattttttatatggaatcactgtattttagcctatatatatttatatgtacaatcatcagtatcataatttcgccatgtatttattatatatattcatatattctgtaatcatcgtattatttatttttaagttttatttcataagtatatttattacttcaattctgtgttcaagatattgacacaataccactttgggcaaggtcaatattctaaacacaataaattaatcatccatatatttttgaaaacggatcatagttgctatcttcattccaaaaatattcaatacttcggctaatttctaatgccttttcttttccaattaaatcttctataaaacccaatgtcatatcaattcccgctgatacaccagaagatgtgtatatattaccatcctttacccatcgtgcttcttttacccatagcacatcttcattttgttctgtaacccatttaaatgatcttttattagttgttgccctttttccatttaaaattcctgctttagaaagtaaagctgaacctgtacatacactaattatgtattttgattctttaaccatatttccaatgaaattgataaaattatcgtcattaaccttttctcttgtaccgctaccgcctggcacaaataaaatcttctcaatattttcatctcttgtatataaacttgtctctacccttaccttttgagaactttcaacaagcccaccatcagacgatataaaatttaattcaaaatcatcttgtaaatttccgaatatctcaactggtccaaatacatctaatgtctcaaatttattgaataaaagtacatcaatcctataactcatgttatcaactcctaattttaaaaatcaaatcacattattaattctatgttcactcataaaaaatctccacaccttacccaataggttgttaccaattcttatactactattttactagatttcttttttacattaaatcaataattaaaaactgtatagtcctttgggtttttagaatattttctaactattttgaacttatattgatgaatcatttttttacaaattgtattatcaatttttctataaaaaatgctagcactccaaagactactagcattcttgaataatattattttttagcactaactatgaataatgaataatcaatgtccttaccccatatgttctttgtatccttaaaaaatgtttctgaataaacatctttaaatttagaagctattagaagctcttttagatttttctggtcaaagccattgtgtccattgaaattctcttctcttttatgaaagcttccatcctccttgtctaaatcaactatacataagtatccattgtcattcaaaagcttataaaaaatctcaactatacctttagtgtccttaacatgatgaagcgccatagaactataaataacatcaaacttttcttcaattggttcattaaatatatcaattttttttgcagtcatgttatttaccttatatttatccatctttgaattaagtacttctatcataccttctgatgaatctaccaatgtaatttttccaaacttatcctgaagattaaaacttataagcccagtaccacaaccaaattccattacagaataatctttattcataggaatagttttctctattttttccgatattatcttggctctattaattctttcctcatcgtcccactctttagcatacttatcaaaattcatcccaaaaccgcctttctactgttcctccattagttcattaactaacttttcatcagctggtgaaaacttaaattctttaagctcctctttcctaacccatttgtactcatcatgaacagaaagctttatatctccactaattatttttcctttaaatgcatttagcttaacaccaagtccatcattatcgtaagtactctctccaaaatattcgccaactgcgatatcgacatcaagctcttcttttacttcacgtgcaagggcttcccttctagtttctccattttcaattctaccacctggaaattcaaaatatccagcattattttttccttccgctcttcttgttatcaatatctcgttattttcatttgtgagaatagctgcaactacgtctaacatttaaatacacctcttctcttaatattattataagataatttaacaaaaaaatacatataatcgttttctttatttaatttgaaaattttaatatagaaatataacccaaaagtaatttaccttcgggcttattccatctagctaacttataccactatatactctgtaggaatacttcttcattagatatatatatttatattaataaaaatattactttagttacactatttattcacatttgtatactttctaagtactgcttcttcgtcagtttcctcaacttttttatttattccacttatcttgagtttatttcctttaaacgtaatagctagaaacataactatactaggtatgaaggaaatcaaaagaactatacgtgcagaaaataacatggtctcctcaataagcgtttcagcatatgaataataaaaactcaagtagttatttcctccaattaataatctccaagataacttccaagcgaatactccaacaatacctactagaataacagatacaatattttcactaatcttctctcttcttttaagaaacttttttcccaaaatataatataaaatcactgcaactattaaaacaaatgttccaaaaatataatctgcccttctatagtcacttaatcccatgtaccgtgtgtttatgaactttaccataatcggaaccttaaaatgaataatttcatagcaaacaagagcaacaaaaatatgaatcaaaaaagctttaatattgttttttaccattaacttcctccatatattttcctttcataactttaaatgaaagacttatcttaagtaaaccacctttaatacactatcttaaaggatttttcattatcagcagttggtatttttttagcaactatatcctctacctttacaaacctattgccttttcttatttcagctaaaaacttgttaagatttttttcttctccctgtgcctctattctaactgtagcatcttcacaatttttaactgtacctgttatgctgtaagtacctgccaaagactgtgcaaagtacctaaatcctacaccctgaactcttcctaaaacttttattaagtatctttccatcaatctcacctcaatgtatagatttataagtgcatactgtaagaattatgtatccgcctctaacatgtgtattatatcatttttacacattataaggaaatcgccacacctatatttagcattgtttccctttattatagtacatttatgaatatattttaaataattttaataaagcacaaaaaaatattaaatttcagcatcatatgtgatagaatgtagactgataaaataaatataatttacatggaggttcctatggaaaacttaagattaaatcatgaaaatcaagaagctcgcagtttcattcaacaggtttatatgtggatgacattagcccttttaaccactgctggagttgctcttgccgtatcaacttcaccaagcttaattgaaactctttttataaacagatcacttttctttgttttaattttagctgaagttcttattgttgcttttttatcaagaagaataaataaaatgtcttcacaagttgcaacagcaatattctttgtatattcagttgttaatggctttacactttcatggatatttcttgtttatgatttaggctcaatttcaagtgtattttttataactgctggaacctttggtgctatgtgtgcatatggctactttaccaaaaaggatctcacaagcataggtaatatttgtcttatgggtctagtaggactaatacttgcatcaatagttaatatctttataatgaacgatatgttttcatttattatatcctttataggagttattctctttgtagcaatcactgcatatgatactcaaagaattaaggcaatggctttatcttcaagctattctggtgatgtagaagcttctgcgaaaggaagtatacttggagctcttacattgtatcttgattttataaatctttttatctatatcttaagattatttggacgaaaaagataattttcaaaaaaaatgttagcagaggattctctgctaacattttttattatttatactcttttgctaacttctcaaaggcaggaagcgctcttaaaatctgatcagttgtaacacaataagaaatacgcacatgaccaggacagccaaagtcatctcctggaactattagtaaatcatacttttttgctttttccgtaaaagcataggcatctttttctaaagcctgtggaaatagataaaaggctccctctggcttaacacacttgtaacctaattttattagaccctcatatagtaaatctctattcttcttataaatagaaatatccgctgtaatacctgcacatttagctacaaccttttgaaaaagacttggagcacatacgtatccaagggctctaccagctccacatatcgctgcatataccttattaaactcttccatttcacttggtacaacaatataacctattctttctccaggaagtgatagagacttactgtaggaataacacacaaaggtattatcatagtactttgttaaatatggcacctcaacatcgtatgcaatttctcgataaggctcgtctgatataagataaatagcatgaccatattctttagctttattttcaagtactttagcaagttttgttattgtttcttctgtataaaccactcctgatgggttatttggagtatttacaataacagcctttgttttttcatttatcctcttttcaaattcctcaaagtctatctgaaaatcctcaatctttgcaggaaccactacaagctttccaccggcagcttccacaaagcacctatactcaggaaaatatggtgcaaaggttatgaattcatctccgggatttgctagagctgaaaaacatatatgtatagaagcagctgctcctactgtcatatatagattatttccactaaatgatgtagagaatcttttatttattgattcagctaaagtatctcttacctttaagtctccttgagcgcttgtatagctgtgaatatcaactggattttcttcttctaaaatttcgaggattgccttttttacagcttctggtgctggaacatttggatttccaatgctaaaatcatatacattttctacccctacttcttctgctctcttttttccgaattcaaagatttctcttataactgagcgtttacttcctagttcatacattttttctgataccatgtgaaattcctcctaccttaagtaaattatttacaaccactatattttaaatgatacttatattataacatcaatttccatattaaaaaaaggaacaaaatatattattccctccaaataagcccacagaaaagttcaaaaagctgaaaaaaattcttaggatcttttcctgtaatctttttaattctttcaagtctataatttaaagtatttctatgaatattaagccttaatgctgcatcatttatttgcccattttcctccacataaatttgtattgtttgaattagttcaagcttatattctgatttatctatacttgaaatcaaatttacaatttcttctttattcttatggtgcaaatgtataaaaaattttaattcttcatattcatatatctttgaattaggttttattttctttccaagctctacaccctttttagaattttcaagtgatattgctgcaatatcctctttttcacctattcctattttctctatgtccttatagtgctttaattcatcaattagaagcttatatttgtaatcatcagagataaaaaatgcagttttattaatatctaaatcataattaaaaatatatttctttttaaggtcataaaatttctttgaagtattattaccatacactaaaattgctctatgtttttttgaaatgtcgaagccaaagtcctgtgctattttagagaatttttcatcataaggtgtttttctatttataagatcataatagaacctctcacgtttaagatttctattttgactttcttcatttgcctctgcttgttctattaacagcactgccgttactctgacaagctttataaattttttcacttcatcagaatagccagttatacctatcaccccaataaccttcccatcaattattataggttcgtttactccaggcttaacactatttttttcactatatattacatttaaagacttctctttaattgcttctaatgccccttcatgtaaatttcctatacgacttaaatctccacttcctattattatcccttcttcattcattacatttatattgtagggaattaaattcatcatttcttctactatactttgagctatagtttttgataacctcattttatgactcctctccacctagacatatattaaacaaattttcacgctgtgtaaacctttaattctttatgcagcacttaaaaagttgaagagaccatcgcccttcaactttttaatcattttaataaagttattttaaaaaatatttatatatttaaatttattaatctcattatattttctgatgtcttttcaatattttcttttccgtctttaagaacttcttcaagagtctttacacctcttattattccaaatatcgagtctatgccttcttcgtacaaatcctctatgttgtccccaactcttcctgcaagtgcaataactggtttgtcatactttttagcaagcttagctactccaattggtgtttttccaaacttagtttgatagtctatacttccttcccctgtaaaaacaatatcacagtcttttactttttcttctagtccagaatactttataaccaatccaatcccacgctcaagtttaccgtctaaaaatgctacaagaccagctccaaggccccctgctgctcctgctcctggcatgtcaataacatcctttttacactgttcttttattattttagcataatgctttagattttcatctaatgtttcaaccatttcttttgtagcacctttttgaggtccaaagatattagaagctccatttttaccgcaaagtggattattaacatcacatgcaacttcaatttccactttacttaatctttcatcaagctcagacaaatctatttttcttagcttagataagcttcctcccccaaaacctatatcttttccttcttcatctaaaaatttagctccaagtgctttaatagcacctactcctccatcattagttgaacttccacctatacctataagtatttttttcacgcctctatcaagacaagctttaacaagttctcctgtaccatatgtagttgtaattaaagggtttctcttctcctttggaaccaaatgaattccgctggcacttgccatttcaattactccaatttctccattacccaaaatcccgtattgtgcctcaaccttatctaaaagaggtcccattacatttagtgaatatacttttccatttgtagcatccacgagagactgcattgtaccttctccgccatctgccattggaacatgtatgcaattaattctatcattaaccttctttattcccttttccattgccaaacagacttcttttgcagtcatgctttctttaaaagaatccggcgctaatacaatagtaaaacttttcataagacattctcctaacctacataaattatagtaatccatatataataactgctgtcagtgctattgaacctccaactatagattcatatggtattaacttcatacgttctttaatattcatctttactgcatccgcagacgcatgaaagaagttaccatgaggaagatgatctataacaacagcttgtgttaatcataactgctgcacttaaaggtgctactcccatagaaagtatagctttactaaaggttcccgttgcaacaatagatcctgttgatgtggaagctgtagctgctgccataagtataccagatattggtgctaagaatactcccgatattccaaaagaatgtattgtactaacaactacactgcttaaattagattttgaaataacaccagcaattgctcctgctccaattagtatcattactgttcccgtcattctatttaaacctgatgtagtatattcgatagttttattaatttttcccattgctattagtccaactaaacctgcaattggaagtataaacatagcatctatcttaagttctgttaaaatctttatatgaagtatacttccaatagggtttaatgctaaaagtattatagctactattggtgcaaccattgcttttccaaagcttatatttcctttgtttgaaacaacttcattaatttcagctgctttaatagcttctccctttttactaattaatgttgcaactatgtaagtaattataagtcctattatagcaggaataaaagctccaatcataactctagccaattcaacattgaaaccctttgcaactgcaatagtattaggattaggggaaataacattaccagcctttcctcctcctatcatagctaaaagtatagaagactttgttattccaactttttttgctactggaagtgctattggtgcaactataataactgtaactggtataaacactcctactgctgtaattatcatactagctagtgcaattgccaaaagaacctttttctcacctaacttatctactatagtttcagcaattttttctgccgctcctgattcaattaaaacaccagctaaaactccagctgctattacacggacaactgctcccattacactatttgtaccagaaattataacgtcaactgtttgtggtaagcttgctcctccaacaagtgctcctaaaattgctcctgtgaaaagtgagtatacaggattgattttcctaagtataagcactatcgcaattactaaaccaaccactgctcctccccaatgaataatatacatataacttcctccctttacggtaacgttttcttttgttgtataacagtattaataataatatatttactatactcttactattgtttatttaatgattttttttgttcaattgcacaaaaaatgttagtgcaattgattctatacactaacattaataagcttttctactttataagctctttcatagactttatattatctttaattatgcatatgtaatctgaattttcatcatatgtaacaaatttaagtgtcttcatcttatacttttgtattaccgcattgttactttgtacacttccatcatcactatatatgtaacatatcttttctttatcctttaatttatcattaagctcttttgaagtatccggtttactaagctcatcttctgatactttaacgctgtctaaacctgcataattaaagaaataatcaaaattagaactatttgttacaaaggtatatccctttaacttatcgtttattcctttaaattccttctcgcagtcatttactttttttatgtatgcagcaaaattcttttcataaagatctctgctcttaggatctttttcttctagggaattctttatatttactaacatagtcttatagttatttaaatccgtccaataatatgaattcttttctacagttatatttccatattgaactttatcatctaaatttaaaattttagttcctctagacatgtcaaccgttgctatactgtttttatcaagtttaccaataaaatctgatgcccacggttcaaaatcagcacctagatacataaaaatattgtacttagaaacattatttatactgtcagatgtataatcaaattgttttacatctatatcatttttaaacataaattgaacattatgtctattacctgaaatatctttaataacattataaagaaacttatttgttgccattatatcaaggctaatactggaatcttttccatctatacttttagcaggaacctttatgttggtttttccggatttcccacatcctacaagtgaaagtattaaaccaacactcataataaaacaaagaaactttttcatatttccacctctattgcaaattagaaaacataatttataagacctctaaaataataaaaaatcattcataatacattatacctgtatagcttagtcagttcaactattaagttgcttatgatacatttaccctttttagtaaaattatttagatataataaattatttttttatattaagtattattaatatttacttaaatataattttatatgaagttaacactgtttttatacgataattattagtatacattttaattgttggaggataactatggacataagctttgaaaaaataatacgctctgtatctttagcactagatttagcagaaattagctcttccgaaaatcctaattgtgaaaaaaatatatcaaatgtaaacttttcaagtcacaaattttataaccattcaaagcgtactacttatattgctttaaaactagcaaaagtacttaatttaagcaataattctatgaaaaatttatacatagcgtcgcttcttcatgatattggtgctgttaattcacttaatgcaagtcatacttctagtgaatttatcaaacaacattgtattcaaggagctgcaataactgaaaatctccccatatttaacagtgtatctcccataatacactatcatcatgaaaattataatggtactggaccttttaaattaaaatatgatcaaatacctattgaaagtagaatcattcatttagctgacatggttgaaacactttatgaagaaaatatcaatgccttcaaacagcataaggatataattaatttagtttgtgaaaaccctttattcgataaagaggttttaaaagcttttttgtctatcgctagtaaggaaatgttttggtttgatatggagaatatatccttcttagattttatattggataatatatctcctgatatagatgacaaattagatttaaagcaatttgaaagctttgcatttatgatatcagatgtaatagatagtaaaagtagttttacagctaagcattcaagaagtatatctaatcttgcttttcaagtttcaaagtatgttggatactccgaagaaaaatgccttaaaatgaaaattgctggccttcttcatgatattggaaagcttgctatacctacatctatacttgataagaacggttctcttacagatgatgagttttcaattataaaatctcatgtatactatacaaaaataattctagatagtattgaagatatacatgatataagttattgggcctcctctcatcacgaaaaactaaacggaacaggatatccaagacatctgaccgcaagtgagttatcagaagaatgcagaataatgggagtctgtgacatatatcaagctttaacagaggatagaccctacagaaaaggtctaagtcatgaagaagcttttaaaatacttaaccatatgacatctgatggttatatatgtgaaaaagctgtatttcaattaaatggtgctttaaaaaagatcaatatgaaacaatctataaaatagggctttaattttaagccctatctcttttattttttgcacatttgatataaacttaatagggataaaattcacaaaaagaggtgatcttatggaatttattgtggatagtgttgataaaacctttagtattggagaacaattaggtgctttagctatgcccggagatattgtttgtattaatggagatttaggtgcaggtaaaacacattttacaaaaggaattgcaaaaggacttaatattgaagactacataacgagtccaacttttaacatagtaaatgaatatacaggaagacttaaattacatcattttgatgtatacagagtaaatgatccagatgaaatttacgccataggctttgatgaatatatcttcagcgatgctgtaagtgttatagagtggtcccattatattagcagcataataccagatgagcatattgaagttaatataaaaaaactcctagatatgggtccggattatagaaaaatcactataactcatactggtaaaagatatgattatgtaaaggagattaagatatgaaacttttagcaattgattcagctacacaagccgccacttgtgcggtaatggatgatgataaacttttaggggaaattacatttaactataaaaaacaacattcagtaatacttatgagcatgattgacgatatgttaaatacagttaatttaaaagtggaagacctagacggttttgttgtgtcaaagggacctggttcttttacaggtcttagaataggaatgtcaattgttaaaggcttaagtgaaggttccaaaaaaccatttgtaagtgtatcctctcttgatgccttagcttataatatggcatatactcctggaataatatgtccggtactagatgctcttagagacaatgtttatacagccctgtacacctttgaaggaaattcattaaaaagacttaccgaatatgatgctattcacattacggagcttattgaactactgaaaggctatgattcacaagtaacctttataggtgatgctgtatacaaattcagaaacttttttgatgaaaatgttgaaaatgtgcaatttgctcctgcacatcttaatttagtgcgatcctcaagcttatgtgagcttggcatggaactattaaagtcaggcgttaaagatgatttaataacctcagctcctatatacataagaaaatctcaagcagagagagaatatgaaaaaaggacaggaatgagtatagatgactaacctaacagtgcataccctagaaaaggacgatatagattcaatcattgaaattgaaaacttatgttttcctactccttggactaaagaatctatggaaggtgaattaagaaacaagtttgcaaaatatgtagtaataaaaaataataaccttgtagttggttatggtggcttatggcttataattgatgaggggcatataacaaacatagctgttcatcctgagtttagaggaatgggaattggaaacaaaattcttgaagaacttataaaactatgtgaaaaaagaaatataccttctatgaccttagaagttagaatttcaaatacaatagcacaaaatctgtataagaaatttggctttaaagaagcaggagtaagaaaaaaatactacggtgacaatgatgaggatgcacttataatgtggagaaattaaaatagcaggcttttgcctgctattttagcatactctctaccttattattggaagatagttcagtttctctatgaagcattggagaaacccttttatacataaccatagttaaggctgatatcataacacctttaattaggttaaaaggcaaaattgaatacactacaaaactatttaaatcatttatagctgggtttattgcatgacccatttttacaatctcttttattgggaaatgaagcaatgtttcgtaaagtggtaagaatataaaataattcaacaaacttgcaaccactgacattgcaacaacacctgcactaagagacattacagcattgattcttgtctttttatacttgtacattgttccagaaactaatactagtacacctccaactataaagttagctaattctcctgtacctgcagtttgtgttcttaaaagatgtaaagcatttttcacaaattctattataattcctgctacaggtcccatagcaaaggctcctaaaagtgctggaagatcacttatatcgatttttaagaaacctggaaaaatcggaagtggaacctcgataaacataagtataaatcctattactgataaaagtgaaattttgattaaagtactgagttttgaattcttcaacttaaaccctcctaaaatcttcagaagcattaaaaaagccccaacgaaaaacgtcagggcatacatatcaaaataatgctatatatcttctttcatccagactttactgtcggctccggaatcaaaccggatcatacctaaaaaggctcgcgggctataccgccggtagggaatttcaccctgccctgaagatcattctttatttttttatattatatatcataattataacaagttcaagtcctttaggctattttttcattgtcagagatatcctatttcttttctcatcgacttctaaaattctaacttccactatatctcctacttttacaacatctagaggatgctttacaaagctatctgagagctgacttatatgaacaagtccatcttgatgcactccaatatctacaaaagctccaaaatcagctacattccttactgttcccataagtgtcatacctgacttaagctgttttatatccataatacctgtctttaatattggctttggcatttcttctctaggatctcttcctggtttttttatagaacttattatgtctgtaagtgttggaattccgatatcgagactttcagctaagctttctattccaagtaaacttaccttgctgtcaatatctttaagtttgttatttgctatatcttcttcctcataccccaacttctttaaaagttcctttgctttcttatatgattcagggtgaactgaagtgttatccaaaacttcatctccatccattattctcaaaaatcctgcacactgctcaaaagcttttggtcctaatctttttacctttaaaagctcttttctgtttttaaacgctccgttttcttccctgtaatcaactatattctttgcaatatttgcatttatacctgatacatatgaaagtaaagacggtgttgctatattaagatctactcctacattgttaacgcagtcttcaactactcctttaagtgattcgtccatcttcttaggagccacatcatgctgatattgtccaacacctatagatttaggatcaatctttacaagttcacttaaaggatcttggagtcttctacctatagaaattgctcctcttaaggaaacatttatatctgggtactctttagctgcaagctctgaggctgaataaactgatgctcctgcttctgaaactattacataataaacgtctattcctttttcctcttttatttcctttaaaagtctagcaataacttcctctgattctctacttgcagttccattaccaagagatacaactccaacattgtgtttataaataagttcttttaaagtctttattgacccttctacatcgttttgaggtgctgttgcataaactgtagccgtatctaaaagttttcctgtatcatctaaaacagcaattttacatcctgttctaaaccctggatcatatccaagtaccgcttttccttttataggtggctgcattaaaagagcttttaaattagccttaaatatttcaatagctgaattttcgcctttttcagtaagctctgctcttatttccctctctatagaaggatatataagtctctttaaagaatccttaacactttcttctatgtacttatcagttatctcatttccagtaaggcagtttaaaacaagataatttattattttttcatcatctgtagctatctttacggataaaatcttttccttttctcctctatttatggcaagaactctatgtggaggtattttacttactgcttctttaaaatcataatacatttcatatggagttggctcctcgctgcttccctgagtttccaaaacaccatttttataagtatattttcttatccactttctaaattcagcattatcagatataacttcacttattatatcttctgcacctttaagtgcttcttctattgtattaacacctttctcttcatttataaaagaagatgcaaattcatttatatcacctttaaatttgcctcctaaaatttcatctgcaagagattttaatcccttctcaagtgctatagtcgctcttgttctctttttaggcttataaggtctatataaatcctctacctctgtcattgtttctgcttttaatactttttcttttagttcatctgtaagctttccctgctcttctattgactttattactgtttcttttctatcatcaaggtttctaagatatataaggctttcatttaattcccttagtgtaacatcacttaatccacctgttctttcctttctatatcttgctatgaaaggcactgttgctccttcatccaacatttctattacattcttaacttgatttacatttatttttagcttttcggctaatctagtacttatatctttcataaataattttacctccaaaaatgttaaccctttaacgattttaataccttaatattataaaacaaaaacttttagtatttcaactttaaagtaatatacttcttctccaacacatacaaatatatgaatgaatttataggatggagatatatgaaaattaaacttatgctaatacctcttattttatttgcatcaatatttagttttaccttttataaatatcacagcatacataaattcaatgccaatgctgtaaaaaataacatagctcttttatccagcagctactataaaggcagaatgggcggtaccctagaaaatgaagaagcggcaaggtatatacaatctcaatttaaaaatgagaaccttgaaaaattcaattcaaacctttattaccaggtgtttaaaacggcttatcctcaaaagattgatggtgccccatacctaaaagtaataagtagcacaaatgaggtagtaaaaacctatacctacggtaaagactttaaagaggatatgctcagctttaagcaaaaccatgctatcctttacaaaaacttcagttttgctgagagcaagtattatattaaggttcactctggaaacaatgtatatgtcttttattgtccagaaaacgataacctgtcttttagaagctcttttgatggaaacagcccttattccatgtttatagtcacaactgaaaatactttaaatgagctaaaaaattatttaaaaaacggctacatagttgactgcttcattccatatcaaaatagctctgccaaccttaaaaatataataggctgcattaagggaaaaagctccaagaaccctgtagttatatctgcacattttgatcatgttggagaagatttaaatggagaaatatatcatggtgcactagacaatgcttctggtgtaagctttatccttgagatgagtaaatttttaaaatccttgggcacccctgatagagatataatatttgctgcctttaatggagaagaatttgggcttaaaggatcagaagcctttgtaaataaatacttatcctctcttaagggagcaagtgtattcaattttgacatgattggtgcacaaaaatcaattcctctatgccttatgggggcaaaaaaagattctgccaatactcctttaataaaagaaacagcagatatatgctcaaaagaccatgtatactttaactatttatttgaaaatgctagcgatcattctccttttagagataataaaatatcggctcttaccttctgtgatgatgataattttagaattcatacaccttctgatactatttcatacatttcgacttcttctatagacagatgttttgaggtggcctcaaaggaaatagttggaaaagcatatgcatcaaacatatttataatgtacactaatcaaataattttattttctttgtgcggttttactttatcatccttgattataattgtacttgctataaaaaaggcaaagtaaaactaaacttatgcatgtaaacttaatacatgcataagttcattataactggatatttctaaaaatttcagctgcaacctcagggtcaactgtgtttatcattattccagtaccaatctcaaatcctcccattggatttaatctaggtataatgtccacataaaaatgatagaactcattttcttcctttaaaaaatggaaacacatattataactgcaattataacttatattatttaatttctttaatattaatgttattatttcccctaattccatcatttctaattcatcaagaccaaaattgctttggtgcttatttttcattatggtaactttgtactgataagttgaatcatacggacaaaaagcagtgaaatatttacccatatgaataattctctttttatattgaacttctttttttagtctgctgcaataaaagcattccttattctcttcgtagtactttttagtaccttttatttccctagatatttcatcaggaactatatttattccaacaatttgagagtgtgggtgtttaagtgatgcaccagagtctttaccacaattcttgaatatctgaacatactttatatcttcattttcataaagtttatatactgtatttttatatgcttttataatttctcgcatttgttctttggtaaactcatacatattatcactatgatttttaccttctattaccacataatgattcccaaatacttcattattatccatgcttttttctttaacaataggatatttgttttcagaaactcttacatggtatggttcttttgtgtcatagattactgctggtgttctatattcattaccaatacaaaatggacattccttctcatattgtaccttttcttccttcttctttttactctttagttcaacaggtctttctgctctttttttgtttattattacagttgtattatttatgctatttcttcttatactcaaaacaatgcatctcctctacagtaaaatgactacctagcattatttctggctgttttccttatttaagtactctattataaatttatcaatttctccatccataacagcatctacatttgaagtctctacaccagtcctatgatccttaaccattgtgtatggttgaaatacatatgaccttatttgatttccccatcccatatccttaagttctcctgctaagtcttctaccttttccttatgcattctttcttttaactcaacaagctttgattttaacatgttcatagcagtttccttattagaatgctgacttctttcagactgacattgtacaactattcccgttggaagatgggttattcttactgctgattctgttttatttacatgctgaccacctgctccactggccctataagtatccacttttaaatcttcaggtcgtataactatatcttggctttgagttaattgtggaagtacttcaacagatgcaaaagaagtttgtcttttaccatttgcattaaagggtgaaattctgaccaatctatgtatccctttttcagcctttaaatatccataagcaaattctccatcaatatttatacttacactttttatacctgcttcatctcctgggagcatatcaattatgtctaccttgaaccctttagcttccgcccatcttgtatacatcctcaaaagcatttgtgtccaatcctgtgcatcggtacctccaacgcctgtatgaagattcaaaatagcattatttctatcatattctcctgaaagaattatttctatcttaaaattatctacctcttcatgtaagtcacgaacttcctttagtatctcatccgcttcttcttcattttcatcttctctgcacatttctataagtacattatcatcttcaattctgctttcaatagaattaaatctatcaattcttcctttaagaaattttatctccatgcttatttcttgtgctctttttacatcattccaaaaatcaggctcctgcatatctctttcaagttcatctattctacttctacttttatcgaagtcaaagagaagccctcatttctcttgccttaatttctatttcttttattaaagaagctgcttcttcaatctttattagcaaaaaaatcaccctctcagttttaaacataaacttatacctgcaccgcaacccctataattaaagattttggaacaggtatatattaaatgactatttatatattatgctcttcttccacaacaatccttatactttttaccagagccacaaggacataaatcgtttcttcctatcttcttttcttttcttcttacaggctctttcttagtatctccagcatctggtccactgtaatttatctctgtttctttaacaactctctgtctttcaggagctctttcagcttgaacatggaatagatacctaacggtttctacttttatgttctctaccatctcttcaaacatatcgcttccttccatctgatatgcttgagtaggatcctgctgcttatatgctctaagtcctattccttgtttcaagtgttccatactatcgatatgatccatccactttgtatcaaccactctaagtaatattactctttcaagttctctcatttgatcgctagaaaactcttcttcttttctttcatatatttccttagctaaagaataaagcttttctttaatttcatcatttgacatagtagcaagttcttcaacctcaactatacctctaggaagacatatatcatcaaggtaatttagaattgcttcgatatctgattcaagctcttcatctactccacttatgtgtgaattaacagcgttataaataaggtcttttatcattccttctatttgatcctttaggttttcaccttctagaacctcacttctctgtttgtagatgatttctctctgtttattcattacatcatcgtactgaataagagtttttcttatgtcaaaattgtttccttcaaccttcttttgagcattctctatagccgaacttaccatcttactttctattgcatcgtcgtctccaagacctaatttttcaaccatgtttttaagcttatcggaaccaaatattctcataagatcgtcttccagtgaaacataaaatcttgaatatcccttatctccttgacgaccagcacgacctctaagctgattatctatacgtcttgattcatgtctttcagtacctattatcttaagaccgcctacatcagtaactccttctccaagctttatatcggtaccacgtcctgccatattagttgctatagtaaccatgcctttttctcctgcatgtgaaattatttctgcttcttgctcatgatacttagcatttaaaacctgatgacgtactcctctttttttaagcaatgatgacagaagttctgatttttctatacttacagtaccaacaagtacaggctgcccatttttatttgtttctactatatcttcaactactgccttaaactttcctagttcagtcttatatacaatatccggtgcatctattctagctataggtctgtgagttggtattacaacaacgtcaagaccatatatttctctgaactccacttcctctgttaatgcagtacctgtcataccagaaagtttttcatacattctaaaataattctggaaagttattgtagcaagtgtcttagattctttttgaaccttaacaccttcttttgcttctattgcttgatgaagtccatcactgtatcttctaccttccataagtcttccggtaaattcgtctacaattactacttcatcttcctttaccatataatctttatcacgtttcattaaataatttgcctttaatgcctgagatgtatgatgttgtatttccatgttttgtggatctgcatagttgtcaatatgataatatttttctgccttttcaacaccctcatctgttagtattgctgaattagttttttcatcaatagtaaaatctttttctttccttaacatcttagcgaagttgtcagccaccttgtaaaattcagtggatttttctccttctccggatattataagtggtgttcttgcctcatctattaagattgagtccacctcgtcaactatacaaaagtgaagtggtctttgaactctttcttccttatatataaccatgttatctcttaaataatcaaatccaaactcgttatttgtaccgtaggttatatctgctgcataagcttcctgtctttgtttttgatcaagatcatgaactattacccctgtagttaatccaagatattgataaagctgtcccatccattccatatctctttttgcaaggtaatcatttactgttactacatgaactcccttacctgtaattgcattcaaatatgacggaagtgttgcaactaatgttttaccttcaccggttttcatctctgaaattcttccctgatgaagtacaataccacctataatttgctctctaaaatgctttaagccaagaattcttgatgaagcttctcttaccaccgcaaatgcttcaacaagtaaatcatcaagtgtttccccattttcatacctctgcttaaattcagcagttttagctttaagttcatcctcacttaaagcttgcattgatccatctagtgcatctattttatcaacaagaggaataatccttttcacttctctatcactatatgtaccaaatattttctctaacagtcccataatattcatcctcactataaattttataaaattactaaaaatgccacaatactatacatttataatattagcattattttttacctttaatataataaattaatatctaatagattatatcatttattcaataatcattcaacttcatatggtctttaaatattaatttctacaaaaaattaacatttgcaaacaaaagagtaaggaaaattccttactcttttactaaaactcaggttcaatcaatccataattgccatcttttcgtttatatacaacatttacctcatttgaatctccattttgaaatacaaaaaagttgtgtcctaataattccatctcaagtactgcttcttcttcagacattggctttatagcaaatcttttagtttttactatttctggttcttgttcttccttgtgataatcaggaatattttggaacttaagcgaatccgaatattttcttctttctaattttgttttttgttttctgacttgtctttccaacttatctccaacaatatctattgaagcatacatgtcattatttgtttcttctcctcttaaaataactccattaaaaggtattgtaacttctactatctgtctatttttctcgacacttagagtgacatgtgcttctacttcaggtttaaagtacttctcaagtttggatatttgcttttcaacagcctctctaaggccttctgtgacttctaaattttttccactaactattaatttcataatttcagcccctctctaaacccaatatagatgtataattgatttacaatcatatatcttaacttaatattaacttctataactacattttaactttttcaaaatgacaaaacaagtagaataaaccaaataaactatatattaaacgagtttaaatcactattacttgcgtttactactagttttaaaccttttctttctgaattatacatattttcagtttattctgttaaatttttgttttatattagtatatgcattttatattttcttataataaattttgattttttttggtttttaactcttcacaaatatgaactttcttgttactatttaaaacctattatttcttatacaaaataaatagtatactttggaaaataaaaatatactatttatctaattcttaacctaaaataatttctataattaaaaagatgctcatagcgatttaaaacatagctatgaacacccttcttttaactatttaatcaaatgtttacttcttaaaaattcatctgctaccttttgaggatcttgtccattatcaactttataattaagtgctctcatttcagaatctgtaattttgtttgcaagtttcataagaagtggttttaatttaggaaacttttttagagtatcttcccttacaataggagcagcataataaggtgggaaaaagtttttgtcatcttttaaaaccttcaaattaaacttctgtaatagaccatctgttaaaaaggcatctgttacctgcgtctcatttttatttaatgatgaataccttaagcctccgtctaaaccttttgtactgttaaacttcaacccatatttattatttaatccaggatatccatctgatctatttaaaaattccatagtactacctaaaatcatattattactcactttagataaatcagatacagtatttatattatattttgaagcaacattttttttcattgcaagtgcataagtattgttaaaaccaataggctttagccattctatattatagttcttatcaaaaaagctttttacatcattataaacctttttttcatcacttatagttggctttttcattatatccacaagtcctgtacctgtatactcaacatacatatctatatttccagattttaaagcattaaaagctacactcgtaccaccaaggtttaattttctttcaaccttatagtccgtattatgttctattaatgaagcaaccatattaccgagtataagttgctcattaaaattctttgacccaataactataacctttttattttgactattatagaacattattgaacctgaaattatagttattactataagaatagccgcaactattttatactttttatttctacctttttttaatttcttagattttattaaatcctcattcttttttccttctgtggtaactaagttttctatcttacctattattaaatctaaaagtagagcgagtattgaggcaggtattgcaccagctagtatcatgttattattaactgtctgtactcctgaaaaaacaagatatccaagaccacccgcaccaataaatgcagctatagtcataagtcctacagcagttactacagaaattcttataccagacattattacaggcatggctagcggtaaacttatttttactagtatttgatttttagtaagtcctattcccgttgcagcctctattatatgcggctgtatatttttcaatccagtgaatgtgttttttataattggcaaaagcgaatacaaaacaaccattactattgcaggcttacttcctataccaaagacaggaattaaaaatccaagtaaagccatacttggaatagattgaactacattagcaagtgctataaccgttgaagaaattttccgtactcttgttattaaaattcctataggaacacctataattattgaaacaattactgcaaataaagtaagttcaatatgctgcaaaaataaacttaaaatttgatcttttctgtcaattgtaaaattaataaagctactcatataaattaacctccttgtttataaattgattgcttaatacagaaagcaaactactttttgtaataagaccaacaaggctcgaatcattatttataactggtataaaaccaatcttttgattctcaactatatctaatacatttactatagaatcattttcatttattgttgttatgttatttttcataatatccttaagttttttattttcatttatactaaatttcaattctcttaaggtaacaattccaagtaatttattatcttttgaagctacaattaacctatccacatgatttgatttcataatctctaatgcttgaatagaagttctttcaggactagattttatcacattatttatcattatatccttaactttaattaattcaggctgattccatattctattttctccaacaaaagttttcacaaaatcatctttaggatttttaagtatcttgtctggagtatcgtattgaattacttttccgtccttcataatacaaattttatctgctaatttaagtgcttcatccatatcatgtgtcacaaaaactatagtcttttttaaattttgatgtatcgaaaagatctcatcttgaagttgatttcttgttaatggatccaaggcactaaatggctcatccataagtattatttcaggatccatagcaagagcacgtgcaatgcctattctttgctgctgtccaccgcttaattggcttggatacttatatttataatcttcaggattcattccgactaaatttaataattcttctactttcttatcaatcttagtttgatctactttctcaatttttaatatcatagaaatattttcttctactgtcagatgaggaaaaagtcctgtttgttgtattacatagcctatatttctccttaatttaatagcgtcttcattctgtattttatttccattaattaaaatttcaccagaagtttggcgtattaatctattaatcatctttagggtagttgtttttccacaaccgcttggacctattaatgttacaagctctcccttattaatagttaaatttacattgtttagtataattctgttattaacctttttatatatattttttagttctatcaaaagaacacctcctgcacagtaagtgacaacttcgcaaaaaaatgaagttgtcacttattatactataggacgaggactttgtaaaggataatgatattaaatctcaattcggtacaaacgctaaacccttatatatcatggcttaaaaggaaataaaaaaaatgagctttcgctcacttcaaatctattaaatcattttgtatcatcatataaaaaatttttaattctgtaataacttccctcatcacctatcgctataaatacatcattatttttaaatgttgcatatggaccaggtgaaagtataagctcaccttgacgacgtatacctattattgtggcaccagtattttgccaaaacttagtttctgaaattctttttccaacaacatctaaattgtcatatattttaaattcaaatggaataaatggattcgttttactaaacctactcgaatagtctattaattcattagtaatgctgtctatccttttctccaattcatttctactatttattaattcttcaatttctgcttttaaggatgttaatgaatttgtgtccttatacttttttataaattcaagacatttgtccatagactctataattataccattacctttttcaacttttactatatccatatcatttaatatagcaacagcacgtcttatggtttcaggagaaactttgtattgacttgcaagatgagaacgaccatataatttcattcctactgaaaaatctccagatactattctgtttgcaatatcaatagcaattttttgataaacaggttttgttatatgttgagacattactttaaaactccacctaaaattatacgatggagaacctcctctttataatcgatttcataataactaaataaaatatattaagttagttgacctggtctttgaccccacactcgcctgctggaagtttcgctacccggaattaccctctcactactaatactctcgcctaaagcggcaggacttacttctaagccgcaccatgctcattaaaactttgtttaacttacgtggatcgttttgcctgcgactggcatcgactttcaaccacaaacctaacttaatataataatattatatactacttttagctacagtcaatactataactttttttgctccattatttattaattcttttgaacaaaaaaaggctgtcgctcccgtagtaaacacatcatgtataagaagtacaaccttatcctttattttctctggtccataaaaactaaagcttctttttaaattatcccatctcatttcatctgtaagtcctatttggtccttagtttgtaaattctttcttatataatttttcaaaggcttatcaactctacttgaaagcttagaagctaaaaattcgctttgattaaaacctcttttttttaaatcatgtgtagtcataggaacaaatacaatttcatcaaattgaatatttttctcaattagtaccttatgcataagttccgctaatacctcaccacacaaaaagtcttttctgtatttaagttttattatcatttcacgtataacgctggaataatatgcagtacaatatacctcaaatgaaatatcatttttctctataaaatatctactatcacaaaattttaccttgtttagacactctttacatatattttcatcatcataaatttcctttttacaaaccgcacatttctcatcattataatatataatacttattacagcatcaaaaacatattttaaatagttaacaatcctttttcccatgctattttattgaagtttctcgttatacttttagccatatccatacattccgtttctttgttagctataaatataacctctcctctctttgaaatatcactttttccagttctaccacaaaagtaaactaacgatttaaagctaaatctattgtcctcattaaaatacaccattatatttacatcactctcatccttagatatatcatcaaacctatctgttataattattgacctttttagatcttttaatccttcttttctattttctttagaatattcaaacactcttcccttaaaaccaagttcataattagttaaataatgaaaaaaactattcattctattactatccttaacaggtattatagtgtttttgtttgtgttaacagaccattttaaataatcatacaccacataaggcatgtctttatttatgtctattcttgttaatataactctaggttcaactactggcattcctgtagcatttataggtattattatttctcttcctctatcaaatatagaatccacggaataagctataaatttacacttccttgtgtcaaatttctccaaaagccttattatttcccttctgttatgcattggaaagcttcttatatcatcataaataacaagattgaaatcaagatctagatcaaaagcattttcataattacatatcataaaattagacgttgtatatagcctttttcccctataatatgtataatctttaagcctagctttttttattaactttattatttcaacttcactttcaatttcatctgttatatacagtacactttttccatttgttatataatcaattataatattcaagaaaatctttgaagtattatatggaggtgagtttaaatttatatatctttccctaccactcaataattttaaaagagtttgagatatcttgctatattcttctctaattttaatacatgatttttccataaaactctcactcctcactctcttcttttattatatcttcgattctccatttgagacctgaatatctttcaaaacttttatcgttatctatcataaattttattgcttttggaaacccaactattacaactagctgctttgctcttgtaattcctgtataaagaaggttcctattcatcagaagaggtggccccatagtcataggaagaaccactactgggaattcacttccctggcttttatggatagttattgcatatgcaagttcaagttcatctaagttaattctttcatatgtaacctctttttcatcatcaaaaataactatcacattattatcctcatctatattacttataaaccctatatctccattaaaaactccttctcctgtcttttcgccatctccatttattctattccattttaacatataattgttttttatttgcataaccttgtcgccaactctaaatatattatctctaaattttatttcatctttacttttatgaggaggattaataatgctttgaagacttacatttaagtttgcaacacctgctatcccctttttcataggtgctaacacttgtatatccctagcagccttccaagacttattaaaaagtggcagtctcttgtaaaccaaactaattatagtattggttatagcttctgcattatcttctcgtataaaataaaaatccttatcctttttatttagaaggggcatttcaccactattgattttatgcgcattcactgtaatcatactttcctttgcttgcctaaaaatattattcaatctaatgacctttacacatttactttcaattatatctctcagcacatttccaggtcccacagaaggaagctggtctacatcaccaactataataaccctagtacccatacctattgacttcaatagactgttcattaaaacaacatctatcattgatgcctcgtctattattacaacatcacattgaagtgtactatagttattattatcaaaaaacacctcatcttcatatccaagctccagcattctatgtatggtcttggcctccctacctgttgattcggacattctttttgcagctcttcctgtaggtgctgccataaataccttcatatttaattcttcaaatatatatgttatgcatcttattattgttgtcttacctgtaccaggccctcctgttattacttctataccatttgaaaacgctccttcaatagcttctacttgtgatggtgcaaattttattttattttcattttcaaactgtattatcttttggtctacatctatctctaagcttttataactatcataggcaagagttattatctttcttgttattcctatctcacaatagtaatattccattgtaaaaacacaattttccccatttattatttcaacctttatcttttgagaaagagtacattcatatattgctttttcaacctcttctttttttacatttaatacattaatacagttctttacaagtttatctataggcatatatgtattacctaaagcacaaaattcatttattacataacatactccactttcaattctaaatggagagtttccttgtattccaagactacgagctattttatctgccgtcttaaaacctattcctgatatctcttctacaagaatatatgggttttgtttcacaacctctatagccttagatttatagtgattatatattttcacacattgtttaggcgtaacgccataattctgaagaaaaatcataatatttcttacttctctttgttctgaatacgcctcatatattttatctattttctttttacctattccctctatttcacttaatctatatatatcattatctaatatctcaagagttttttctccaaatttattaactatcttttttgctgttacaggacctattcccgatataattcctgatgccaaatatttttctatacctaataaagaattaggtagtatttcttcgcagcgttcaattttaaattgctttccaaactgtggatgaacaatccattctcctgaaatctttaaagattggccttccataatatacggtatgcatccaacaattgtaattttatcttttccttctgcatttgcgtttgcaacaacatacccattttcttcatttttgaacacaacagcttcaataacacaacgaagttctaccatatagatttctccttactatagtgattcctcttttgctattataaaaaatacaactgtatttgtagttaattcagtttcactataaatattttataattacattaatattaacattcacgtaaaaaagagatacaataaatttatgtacccccctcatacctttacatttttgtaagatgcttattgcaaatgatttcaactaattccagaactagtataatacctatataaattgaaagatataatatttcaatgctaactctcttccccgcaaaaatgtacaaatggtttaaaatatgtaggaaagttttaatcgctaaaaatgtcaatcccaaagatataactaatgcaaaaaccaaagcctttatcatgaaattcttcacgttccaaatcatatgcaaaaatccaccctcatatggatttttcataactctaccttcttttataatattatacaaaataagtatactactaatttatttacctcgaacaagaattaatccatttccctatgaattaattctcattttgatttctcataaccaatactcttataatatcataatatatataaatttaaaatatcctatataaagattttaacataagtataatattatactaatatattttaaagttatcctagaataaaaatagccacttataagaatggcactgaaaaactataagcttttcagtgccattcttatatcaagcatttattataaatatttttttatcgcttcaactctatccaactgctcccatggtaattctacatctaatctaccaaagtggccataagctgctacttgtctgtatattggcctcttaaggttaagatctcttattatagctcctggtctcaaatcaaaaactttttctactatttcaacaatcttactttcttctatcttaccagtaccaaaagtgtcaactgaaatagatactggttttgcaactcctattgcatatgcaagctgtatttcaagtttatcagcaattcctgctgctacaagattctttgcaacccatcttgctgcataagctgctgatctatcaaccttagttggatcttttcctgaaaaagcaccgcctccgtgtcttccatatccaccataagtatcaactattatctttcttcctgtaagtcctgaatctccttgaggtccacctacaacaaatcttccagtaggatttatataatattttgtattttcatctaaaagttcaggtgatataacatactttactactttttcaattaaatctttttcaatctgctcatgtcctatttcaggtccatgctgtgttgatattacaatagcatctacccttactggcttatcatcttcatactctattgtaacttgagtttttccatctggtcttagatagtccaaagtaccgtcttttctaacctctgctaatcttctagataatctatgagcaagcgcaataggcataggcataaattctttagtttcgtttgtcgcataaccaaacatcataccttgatctcctgcaccaactgcatcaattttatccatttcaccttttttagattctaaagcttcatctactcccattgcaatatcagctgattgttcatcaatagatgttacaactgcacatgtatcgcaatcaaaaccatatttagctctagtatatccaatctctcttacagtttttcttactattttaggaatatcaacgtaacaatttgttgatatttctcccataacattaacaattcctgtagtcactgtagtttcacaagcaactcttccatttggatctttttccaatatggcatctaaaatagcgtctgatatttgatcgcagattttatctggatgcccttctgttactgattcagatgtaaataactttctcattatatccacttcctcctacaatataaaaataaaagtctcctcaataagaagagacttaacattctctctcttatcttgcagaataattctgcaggaattggcaccattatgtacttaaattaatacatcggttgccgggtttcaacgggccctttccctccacctctcttgataagagtttccattcaattatattacacactaaataatacactttataacaatcttagtcaatataaacttaaaaaaagacacttgtgtgtcttttatggtggaggaacatggattcgaaccatggaaagctgagctaacagatttacagtctgccccctttggccactcgggaattcctccacatttggtgctggcagtaggaattgaacccacaacctactgattacaagtcagttgctctaccaattgagctatgccagcttattaaattttattaagtgggcattacagggctcgaacctgtgaccctctgcttgtaaggcagatgctctcccagctgagctaaacgccctagtttatttaaatggtggaggaacatggattcgaaccatggaaagctgagctaacagatttacagtctgccccctttagccactcgggaattcctccacaagacttgcatcagcagttttcaccgcgtcaacaagtaatattatacgttgataccctttaaaaatcaatggccataatagaccattatcggcaaatatcattatatttttcagcaatatctcttaattactccacttttagcacgcaaatcatttatatatattattattttaaaatctattagtgatattaaaagtgttaagtacatataaattatctaggaggtgattctgttgaacaaaatcaaagctttttataacctaccaatggcatactacaggctctcaaattttttaaaacattatatagatgataatacaataataatatgtataggaacagatcgctgcataggtgactgccttggccctatggttggaacaatgcttaaggaaaagttctttccactaaacgtttacgggacaatttcggaacctatccacgctttaaatatagataaaaaactgtacaaaataaaaaaagatcatacaaattcaacaataataggcatagatgcttgcttaggtgatactgaaaatataggtgagattcaagtacgagattatgctattcatcctggaaagggcgttggaaagtcacttccagatgttggcgaagtttctattgttggaatagttgattcctgtgaaagcagcgaattatttactaatagaaatatacgtttaaacttaatctttgaaatgtcaaaagtcatagttcaaacgattattcattcttattatcttcataaaacttttagtgatagtatttttccagatagcgcatctacactaaaatagaaagcgagaaaatataattaaaatacattctagtcattaaaggaaaaattgaaagggcagcatgcccattcaatttttagaatattttataatttgcatataaaaattgactttaatgaatacttatattttaaatttaattttctcgcttacaaattttattcttaactataatttataactaaagttacctaataagacttaactcatcattcatatctatcttgtctatatactcaagtgatttacccgttcctaaggcaacacatgagacaggatcttcagccacatatacaggcacttgtgttacctcttgtatgaacttatcaagtccatttaatagagaacctccgcctgtcatcattatacccttatctgatacatctgccgctaactctggaggagttttttcaagaacagcatgtgcacattctgcaattgaacttacagcctctttaagtgcatcacgcatctctgaagaagatacttcaacgtttttagggagtccagtaactaaatctcttcctctaatctccatagtctcctctatttccttcttatatgccgaacctatatttatctttaaatcttcagccgttctttcgccaatcattaatttatgtttttttcttatatactttattatagattcgtcaaatgtatctcctgctacttttatagagcttcttacaaccataccacctaatgaaattacagctatatctgtagttcctccacctatatctataaccatattaccacttgctttagtaatatcgagacctgctccaattgcagctgctaatggctcttcaatcaaactaacttttttagcccctgcattttttgcagcatcttttactgctctttgttcaactccagtagcctcacaaggaacacatattataattttaggttgagaaattcttctcttaccgcaagcttttctgataaaatgctttagcatcttctctgttacatcatagtcagaaattacaccatttcttaatggacgtattgcagtaatattacctggtgtcctacctatcatttgccttgcttcttctccaacagccaaaacttcattattagtacgattgattgctacaacagatggttctttcagaataacacccttaccttttaaataaaccaataccgtagcggttcctaggtctattcccatatcatttcctataccaaaaaacattcctttattcactccatctcatacgtttatttctacgttttaaatatagatatattttttaatcctaaaatatccaaactacatttcccttaattaaaaaattaaacaatatatcctacagtgtaataatactaaaatatatatttatatatcttctatattattataaacggaatgtttttaaccttcaatagctttatacttcatttttgttgcttttcctcctcttatatgcctttccgctttatttaactccagcacacctttagcaagctcagcaatttgaggatttatttgaggtaatctttctgtcatatctttgtgtattgtactcttactaacaccaaaaactttagctgtttttcgaatagtagccttagactcaattatatatttcgcaacttccataactctttcttcaatgtaatctttcaaagttgctacctccttaacccttctaattaataaatatgcattaatatcaccataaattactttgagtgttttcaaagtaatttattaatcttaatgaactaaaattttttcaggatctacagctaaataagttccatcgttttgcttttgatcaatttcaaaatacaaacaacttgtatctgttatcaatttattactgtaattactgtcacctattttacctatagtttgaccttgtttaacattatcattcggtttaacagttatgctcttttcatctaaattatcatatactgtagtgtaacctgtttgatcatttgaaatagtaactttaccagcatcaatagcttttacaactccatcacaagcagctataacattggaatctttactaggagatatatattctcctggtatactagtatactttccatttttagaataccaagtatcaaatttaactactatattgccattttgaattggttccataaaactcttttttacaacgttattagatgatgcttgtgttgttgattgagtatctttcttaattaaattttgattttgattaacttgctttgcattctctattttttctttagctgcatttcccttatcagttactttcgatgttttatttttattctgtaaagtacttttctgactaggctgatttaccgaaacactcttagtgttagtctttatgttcatatatatgctaactgcacctataatacacaaacaaagaaataacactatgtaaaaagcatttctttttaaaaaatccatcaccctactttgtttattacttttgttgtttttccaatcattattcattgctaacacctccttttagtattgtgtccataacatagcaaaaaatacattttatatgacttttttttgtaaaactaatgtaaaaattgtaaaaataaaaagctagtttcatcgaagtagaatataacatgaacttgttcaaattataattccactattctctgaaactaacctatttctataattatacttgtttaattagcaaacttataaatagcctttagtaacttatatccttaatctctacccctgtataataatgttttactatatctttatagctcgatcctttatctgccatagctttagctccatattggctcattccaagaccatgtccatacccaatacaatcaaactcaatatttgaaatattatacttgatctgaaagtttgttgaattcaaaccaattatacttctaaattttgttgcttgtaaaacattatttcctacctttatctgattaatagtgcctgtactatttcttttcaatatactaataccaactcttgcttgaataagatttattttgttattaactgatgaatttattttatccacaaaatctccgtaagacatttttaaacttgttttatacttatgcgccgactcctctcctggacttgatacactctttaaatatggtttatcttctccaagtacctctttggcattttcagtttttccactactaacagaaaaataatatggatctgttattattttattatcatatgtaattacttgtcctttagtatcttctactgctgtacttatcttattccagtattcgtttgccttatcttttggccatttgtttagtacatcatcttgctttgtataaacctgacattgaactgtatttacaacatctgcaccatatgcatccttgtattttcgtccaccaaattgctccatatggcatactgcaaatgtcctagctgcaactgcttgagccttcaatgcttctatattaaattcaactggcatttctgatgagataacaccttttatatactcctccagatttaccttctcaatttttttttcattgtccatgtatacacttatatcacaatccttagtgttttctttaactatatttagggtatcatcattctctttataagaactcttcttcactatactattttcatttgtatgattttgcttatctcctattccaccaacaaatattgaaaccgaaaaaataaaaattatagttaccgctaatcccataaaaatttttttcaccacttatttatccccccgtttttttattaagctttaaattataaaattttattgaaaagcatatataatatattacttatttccatttcaaattattacatcaaaactttactattcctaaaacaaaaaagtagagttctagattattattgtaaccctatcctcaattggatactactacaactcatctataaactctacaagcggaattaattccctcaatgatataatatttcattattctactctttcaatttttgctcctaattttgtaagctttttttctatactaacataacctctatccacatgatatatatcactaatttgcgtttctccctctgcaacgagtcctgctaatataagtgcagcacctgcccttaaatccgttgctcgagcactgcacccggtaagttcttttactcctactattacagcactccttccatctatttttatatttgcaccaaatctctttagttcaggaacatgcataaatctattttcaaagattgtttctgttatcacactagtaccttcagtgcagcataaaagggacattatttgagcttgcatatcagttggaaatcccgggtatggcatagtttttatatctacaggtttaagttcatttctaccgtctattataagacttttgccgtctatctccatatttattcccatttcacaaaacttggctatcattggttttatacttttctcttctacaccatttatctttatcttactctttgttatagctgctgctattataaatgttcctgcttctatcctgtcataaataggtgtgtattttattccttttaattctttaactcctcttattattattgctcccgtttctatcttttttatatcagatcccattttatttagaaaattaattaaatcatctatttctggttcttgtgctgcattttctattattgtttctccttcagcaaaaactgatgccattattatattttcagtagcacccacagatggaaaatcaagatatattctatctcctaaaagcttagcagcatttgcttcaacgtatccatgaccaatttctatatttacacctaatgccttcaatcctttaagatgtaaatctattggcctagttcctatattgcaaccaccaggcagtgatattttaaatcttccatatcttgaaatcataggacccataattaaaaaggaccctctcatcttcctaacaagttcagcatctggttcaatactttttacattggaagtatctattttcatatcgccactgtttaagtctatatcaacttgtgctcctatagattttaacaaatcacttatcacaaatacatctaaaagcataggacaattttttatcgtacacttttctccacataatatagttgcagcaattataggtaaaactgaatttttagcacaacttatatctacttcaccatttaatgtttccccaccctttataataaatttattcattttaatcctccaatcataaactgcataacaaaacatgatttagttatataattttcaatacgtgattggtatgattggtgtaccaactattataaaattcccagtttcatatttacatacagaatagttaaaatcaacttttctatttccatcttgtatataattaaacttttttgtatatgcagtagtgcttaaatttttatttaatttaactgtttttatattttccgctcttatactatttaaaactttctttactttttcatctatgttatatacatttttcattttacttttagcctttaaatatttataacactgtagtctattacagtttgatttattacttatcacagcttcctcaagactattaatatcattatttgaagttttctcctgtaatgcaacatcaactttaacttcattgccatctaatctattagcttctaaataacctgatatatttgaattcttaaattctacacaatactccaatccatcgtccgaagttatcttatcgcatagatttgatccaattgaaccttttatattttttataatattcctacttatacttttatagtttccactctttacaaatgaaatattaacgcccgtttgcaccacattgctatgtgagtatttcaatatctcgctaaaaatatcttggtccaattccgcttttatactatgtccacatatgaatatcagcgatataaacatcaataacgcaaaacaaaaaattaatttattatacttcatgttttccatcctcccatactatgattattgacagaaaacattgtttttattcctagatgaatttaagtagtagacaaacagtcacctattaatatccttagctttactaacaaatataaaattattagtacaatattaatatataaatttatttaaaaagtgtgaaaaaaaaccgtggaataaatccacggttttttatgaaaattaatcattttttgttttaattcttgcaagtgctcttgaaagcgatagttctgctctttttacatctatattattactagttttaagtcttttttctgctctttctttagctgtctcagccctttgaatatcaatttcatctggccattcgcttgcgtcacacataaaagaaacttctgattctcctacatttaaaatacctgtagatgtaaatactttttttcttgaaccatcttcttcaactaaaattgtttcagttggtgtcaaaaaagcaaccaagtctgtatgattaggaagtattcctatttcaccttcaactgttctggttataatctcttttacatctccaacataaaacgtcttctgaggagttagtatgctcaatttgatattatttgccatacaaaatcactccttagctttccatcatttttttagctttttcttttacatcttctattgttcctgcaaataaaaatgcagcttctggaagatcatcacacttaccatctaatatttctttaaaacttcttatagtatcttttacaggtacaaactgacctttcattcctgtaaattgttcagcaacactaaaagcttgagataagaatctctgtactcttcttgctcttccaactaacaatctatcctcatctgaaagttcatcaacaccaagtatagctatgatatcttgaagttcttgatatctttcaagtatatgtttaaccttgttagcaacttcataatgctcttctccaacaattcttggatcaagtattcttgaagttgattcaagaggactaactgcaggatatattcctaagtttgatatttctcttgaaagaactgttgttgcatcaagatgcgtaaatgttgttgctggagctgggtctgtaaggtcatcagcaggaacatatacagcctgaacggatgtgattgaaccctgttttgttgatgttattctctcttgaagagcacccatttcatttgcaagtgttggctgataaccaacggcactaggtattctaccaagtaaagctgaaacctctgaaccagcttgtgtaaatctgaatatattatctataaatagaagcacatcttgacctttgtctctaaaatattcagccattgtaagtcctgttaaagcaactctcattctagcgccaggtggttcattcatctgaccaaatactagagctgttttatttataactcctgaatctttcatttcataataaaggtcattaccttctcttgttctttctccaacacctgtgaatactgataatccaccgtgttcttttgctatattatttataagttcctgaataagaactgttttaccaacaccggcaccaccgaacaaaccgatttttccacccttttgatatggagcaagtaaatctataaccttaatacctgtttcaaacatttctggttgaactgattgttcttcaaaggttggagctggtctatgaattggataatacttatcagcattcatgtctcctgcttcatctattgtctgacctaaaacattaaaaagacgtcctaaaacattttctccaactggtacagatattggtttaccagtgttaactgcttccattcctctttttaatccgtcagtaccttccattgctattgttcttactatgtcatctcctacatgttgttcaacttcagcaatgagttttttattatctcccatatctatttctatggaattatagatgtcaggaaggttctctgcatcaaatttaatatccacaacaggtcctattacctgaacaattttacctacatgttctggcatcagtttccctccttatttgagagcttccgctcctccaactatttctgttatttcttgagtaatagcactttgtctaattctattatacttaatatttaaagcatcaagtaagtcattggcatttttagtagcactatccattgaggacattctagatgcctgctcacttgccttagaatttaataacaagttaaataactgctgttcaatatgaagccttatagctttttcaagtataatttctgcatctggttcaaattcagctacactcactttttccatctttttaggttcaatagggagtaccttctttacctcaactttttgatttaccgtagaaagaaattgagtataaataacatgaacttctcctatttcgcctttttcataaagacttaaagcacggtctgctatttccttagcttcttttaatcctggctcgtttggaatatcaacgtattcggataaagtctcatatttaagccttttaaaataagatattcccttttgaccaacagttataagtaaggatttatctttatcccctctcataacattgtcagcagcagttacaacagctccgttaaaacctccacaaagaccagaatcagaagtcaaagctatataaagttttttgtcacttttatttccagctacatataagttgctcttactagaagaacttacaatcttatttataacatcattaaaagcttcataatatgctttattcgcttcgagattctgtctagattttcttaaattagaggtggctataagtcccatggcgtttgttatttttttagtattcgtaatagacttaattcttctttttataataataagtcctgctcctgccattacttcacctcctgcataggaaagtcattaactactgttcctctgctaaaaatatctttttatattcgttaatagctttggtaagctgactgcttatatcatcagttagctcttttttctcaagtatttgcttacctaagtctctataatgagcatctacatactcaaataatccactttcaaatgcactaagttttgaaacatcaatatccattacatactcatttacaacagcatataaaatcattatttgtttctcaactggcattggcttatattgaggctgtttcatcatttcagtaagtcttttacctttttcaagtctctttttagattctttatcaaggtcagaaccaaactgagcaaatgcagcaagttccctatattgtgcaagctcaagtcttaaagttcctgaaagttttttcattgctttaatttgagcactaccaccaactctggatactgatatacctgagttaacagctggtctttgtcctgcatagaataattctgattcaaggaatatttgaccatctgttatagaaataacatttgttggtatgtaacccgcaacatcaccagcaagagtttctattataggaagtgctgttatagaacctcctccaagtttctgtgaaagtttagcagctctttcaagaagtcttgaatgtaagtagaatacatctccagggtatgcctctctgcctggtggtctacgtaaaagtaatgacatcgttctgtatgcaacagcgtgctttgaaagatcatcatatacaataagtacatcttttcctttaaacataaagttttctgcaattgttacacctgaatatggtgctaaatattgaagtggtgctgaatctgaagcagttgctgctacaactatgctgtaatccatagctcccatttcttcaaatgtattaactatatgtgctactgtagattgtttttgacctatagcaacatatatacaaattacatcttttcctttttgattcaatatagtatcgatagctatagcagttttacctgtctgtctatctcctataataagttctctttgtccttttccaataggtatcattgagtctatggcttttatacctgtttgaagtggttgattaactgattgtctatcaataactcctgtagcttttatatctactggttttgaatcttctgctttaattggtcctttaccatctattggttgaccaagagcatttactactcttccaagcatttcttcaccaacaggcacttcaacaacttttcctgtacttttaacaatgtctccttctttgattccttcttctgaaccaagtaaaacacatccaacattgtcttgttcaagatttagagccattccatacacatcgtttggaaactcaagaagttcgccagccatacaattttgtaagccgtatattctagcgataccatcacctatttctattatcgtacctgaatctactgtttctaatttactttcatatccctcaatctgactttttattattgaagttatctcttcaggttttatgttcataggctcacctctattcttctttaagcattacttttttcatgctttctaatttaaacttaatagttccatcaattacatcatcgccaactcttacataaactccgccaataatagtcttatctattatttctttgaaaataattattttattatacttagcggaaagcttgcttgcaagggttgttttttcattgtctgtaagtggtattacagttctaacttctgcaacaaccttattatgcttttctaaggatattttatttaattgagttaaaattccttcagcatcatgaatcctctttttttcaagaagaagcaataagaaattaagtagcttctcatcaatttttcccttaaagatttccataaatattttctttttttcagaagtacttatctgtggatgattaacaacttgatttatattttcatcattcttaagcagatgaactatttcaccaaagtcattaatatactcctctaacttttgatttttttcacctacttcatataaagcaagtgcgtatcttctatctaagaattcatacataattaaatacctaccttagatacaaaatcttctataagttttctgtgttctgcttcatttatggaattttcaagagcttttgaggaaattaatacagcaagttcaacaacttgatttttgatttcatcttcagccttttctttttctctttgggtttctcttttagctctttctaatatattctgagcttcagttttagcttctgctgttatttcctctgaaactttttctgcttttaccttgtaattttctacaatggtttttccttgaagttttgaatcttctagattcttttcactttcaacttttaaaagcctagcttcttcgttttgtgcatcagccttttttattgttaatgctacttcattattcctatcatcaataactttatttactttatcaaagaaaaagtgcttaagtatcaacataaggattatgaagtttactattgtaaagcctatagtaactaaattaaattccatacactcaaaagcctccctccaggcttattctttattaagataacctatttatttaacaaataataacattatagcaacgaataaagcgtataatgatgtaacttcagcaaatgctaaacccattatcattgtaggcataacttttgaagctgattctggttgtcttccaattgcttcaactgctttacctgtaacagtacctatacctacacctccaccaatacatccaattgctgctagacctgcacctagatattgcattcctagtaaaaaagtatgagaatcaatattcatttcgtttcctccttaaaaaagtttaaatttagtttataataactaacatcatgtgatgcagcttattattactttaatgttcgattcctagcttagtaaatatcatagttaaaagcacaaatacataaacttgtaaaacaccatcaaacatatcaaagaacccatgaagaggtactggcaataaaattttagctggtgttgaataaataagtgacataactatggcaccaacaagcatgttaataaataaacgcaaacataatgatactggtattgtaaccttttctaaaaggttcataggaaccattataggtccttgactaaaaatggatttaatatatcctccaacaccaattctttttattgcagttgcatttattaaaaatgcacttactaaagcaaagcctgctgtaacactaatatcctttgttgctggttcgatacctactagccctgttaaatttaagaaaagtataaacactgccatagtaccgataattggaacgaaattcatgaatttctctcccatattttcttttaccaatccatttattaagttaacaatcatttctattacgctttgtttcctatttggtactttcttaagatttttagtaagaaatattgcaagtaatattataactgccatgataatccactgtaatactacagtttctgttatagcaaagttgtaacttccaagcttcatcgaaaatactgtctttgcacctagctccattcaatcacttcctttcatcgtttatttactagtgacccataaattataagggctataaaatgagcactatatcctcctaagtaggctattaaataatatttatatattttataaagaataatacctataaaaaaaacaagtattactctaaaaattgaactaagaaatataagtgacgtatttcccattttttttacaaaaacgaaatcagctgttaaattacttaaataaaaattaaatattgctgaaaaaatccctataatcactattaacgaaatcttataattagcagcaaacaaaagtattactgaaactattgcagcaataattgcatcataaagagttacaacctttaacattcttttaatattcagattcaaattacttcctccactattttaacacgttatttaaattatatatcttaaatttttataaataaaactctgttttaagattttttttataatatttacggttctttcattactgcaaacgtttttaggccatttcttatcgctatagtaattataaattcaatttacgcctagtactgcattagcctcataatctttcaaatgactgaaaattgataaaatatattcattttctgaattttatacaaatttcaacataaatatcattatgacatttttttaccacactaactaaattattctaaaagaaattgaactgtctttagttttaattctacattcttatcgtattttttatacataagtttagaatttttttaaaaaataactctgtagaactaatttataattctacagagttatttttaacaatactttctagcacttttctagcaatattgctgttccttgtccgccacctatacataaagttgctaagcctttttttgcatctcttttttgcattgcgtgtacaagagtaacgagtattcttgcacctgatgctccaattggatgaccaagggcaatagctcctccatttacatttactttattcatatcaaattttaaatcttttgctactgctaaactttgagctgcaaaagcttcatttgattctattaaatctaattcatcaactgtccaacctgctttttcaatagctgcttttgttgcatagaaaggtccatatcccattattgctgggtcaactcctgctgaaccataagaaactatcttagcaagtggttttactccaagctctttagctttttctgcactcatgattacaagtactgctgcacagtcatttaatcctgatgcattaccagctgtaactgttccatcttttttgaaggcaggttttaattttgcaagtccttctatagttgatccaaatctagggtgctcatctgtatcaactacagtttctccctttctgcctttaattactacaggaactatttcatctttaaattgacctgattttatagcttcttcagcttttttttgtgatgcaagagcaaactcatcttgttcttctcttgaaatgttccatctctcagctatgttttctgctgttattcccatgtggtaatcattaaatgcatcccacaatccgtcagtgatcatttcatcaacaaatttagcgtttcccattctatatccccatctagcgttattcgctaagtaaggagctctagacatattttccataccacctgctattattacgtcagcatctcctgcttttataatttgtgctgctaagctaactgttctaagtcctgaaccacaaaccttattaatagtcatagctggaatttcaactggtaatcctgctttaaaagatgcctgtcttgctggattctgtcctaaacctgcttgaagaacatttcctaaaatgacttcattaacatcctctggttttattcctgcttttttaactgcttcctttatagctgtagctcctaaatctactgctggtacatccttaagagactttccataagatccaatcgctgttcttactgcactagctattacaacttctttcattctaactaacctcctaaattttgatacggggtaacagataaaccatttcaatctatttcataagttccatagtttatccctaatttatacgttttctctaacaacttaattatacccactattattatttttatcaatatattttgttaaaaaaaacacaaagtttaatattttttaacaaaaaaattaaacttatgcatatgctaacccccttaaaatcatgttttagcataaatacataagtttatattttaactatattaatgtaataaaaaatacttgtgcataagaaacttcattctaaattcttttagaatgctcatgtattactttttaggtgaaaattcatctggtctatcctttaatactccaaaatgatacaatatagcatcaactattctatctgaagcctttccatcaccatatggatttattgccttactcattttttcatattcttcttcatctttcattattttataggcttcgtctactatctttttaatatcagttcctactaattttaccgttcctgcctcaactgcttctggtctttcagtaacatctcttaaaacaagtacaggctttccaagatgaggtgcctcttcttgaagaccacctgagtcagtcattaccataaagcatttattcattaaattatgagtttcctttgtatcaagtggaggaagcaagtgtacccctttcataccattcaaattattatatacaacatctttcaccacaggattcaagtgtactagataaactatctcaacatcttcattttcttcagcaattcttcttaatgctgtacatatgttttctattccctttccccaattctcacgtctatgagcagttaccattataactttcttatttttatagtctaatttattcaattcatcattttcaaatacataatctttttcaaccgtatgattcattgcatctacaacggtatttcctgtaataaaaatattcttttcattaactgcttctcttaaaagatttttcttagaaccaagtgttggtgcaaaatgcaaatcagcaaccgcacctgtaagcttcctattcatttcttccgggaaaggaaagtatttgttgtatgttctaagccctgcctcaacatgacctacagctattttcttataaaatgctgcaagagccgcagcaaatgttgtagtcgtatctccatgtacaagaacaatatctggattttcatcagcaaatattttatctaaaccttccaaaactcttgctgttatacctgtaagcgtttgtttggttttcattatatttaaatcgaaatcaggatttatatcaaacaaattaagaacttgatctaacatttgcctatgttgagccgtaacgcatacttttgattcaacatttttattttcattcagcctcctcactaatggcgccatttttatagcttccggtctggtgccaaatatacttattacttttatctgtttcataaaattacctcctcgagttacaaacaactcatataccttactttatttatgtttaaataatccaaacttccatgctaaaccaactatgcatataaccgctccagcaaaaataacgtatgctttagtattagtaagctgcattgctattactgctacaagtcccataatagcacttatgaaatacattattaaaactgcttgcttttgacttaagcccatatctaataacctatgatgtaaatgccccctatctgcctgcgttattggcttgccatttattttccttcgtattattgcaaaaatagtatcataaattggcaatccaagcacaagaattggaaccgctaagacaactgcagatgctgatttaatagctccctgaatagatatagctgcaagtgcaaagccaagaaattgagcacctgtatcacccataaaaattgatgctggattaaaattatatggtaagaatcctaatatagatccagccaatattacagataatatttctgcttcacttctagtaggtccatttaaaaatgcaactattgctatagtaacacttgaaataaacccaaccccagcagacaatccatctaaaccatctattaaattaaacgcatttgttacacctattatccatataatagttattgctatgcctataaaattgtttatatgtatgtatgaaaaagaattacttaatggatttgttaccatcgatattctaagtccaaatcctattaaaacaaatgcacccaatagttgaaataacactttatataaaggtctcaaacattttaagtcatcaataaatcctccaagaactattattccccctccaaatattatccccatttctgccttctctaaatgtcctttttttaataccaaaactagtacaaaggctaaatatatcgcaagaccgcctattttaggtataggctttttatgaactcttcttttatctttaggtatatctatggcttttatatgttttgcgaatttcctcacaattggcgtagtcaaaaatgaaatagccattgctataataaacattatgtattttttctccatatttaccttcctttttcgaatcgctgaatagttttttcaatttgtttatgatatatcatgctttaatattctacatctcctctaagtgaatcatcatcttcaatccactgctgaacttttatttccctataactgtcctttgtatcccttattaaaattttttctattccggcatttaaaattaatcttttgcacatagaacatggaaatgccttttctacatattcatgtgtctcagcattctttccaacaagataaagtacacttcctagcatttcatgtcttgcagcacttataatagcatttgcttctgcatgaactgatctgcataattcataatgagttcctcttggtatattgagtttctttcttatacacactccaagatcgctgcaattttttctaccacgtggagatcccgtataacctgttgatattatctcatcattctttacaattatagctccgtagtctcttctaaggcatgttcctctttcaagtaccgtctctgctatatctaaataataattatttttatctcttctttccataaatacttctccttaattttacctgacatctctgctaatttattctcaatgtaaccatttctaattatagtgtaaaaaataaaaaaatgcacccttgaattgaatctttttataaatttttagacattaacctttaaatctaaattaatgcatatatgtttaaagcctatataacttgacaatacataatattagaaatttaatcctttttattatattacatcgattataatattaacggttctattatatttagataccattcatacttgcaaatgatttgcattatgtttataatatattgatgtactaaaatactttattatccttataggagtgatttataaatgatatccatcgaaaatctgaatttttcttataataaaaattcggattatgtaattagtaatttaaacttacatataaagaaaggttcctacacctcaatactaggtgagaatggaacaggaaaaagcaccttaataaaactaattttgaattttttaacccctgtaaagggtactattaaaatacaagcaaagagaataggctatgtgcctcaaagtactgaaaattttaattttgcatttcctataaccgtatatgaaatgcttttgtgtcatgcaaaatcccttaaacttaaaaatcctgacaatgaagtaactaattctcttaaccttatgggaatggggaatttcaaaaaaaatcttattggttctctatcaggcggacaaaagcaaaaaatatttatagcaagatctttaattggaaatcctgatctattaattcttgatgaaccctcaactggcgttgatgtaaaaagtcaaaaggaaatttatagctttttaaaaaagttaaataaggaaggtaatgttacaataatatgtgtagaacataatttaaaggctgcttattctaattcaactcatattttcaatttccatggagaaagtggctctttgcttaacattaacgattttttaaaaagcaatatggaggttgttaaataatgattgaactatttcgtctaagttttatgcaaaacgctttacttgcctcggtaatgattgcaattttgtgtccacttataggtattttcttagttttaaaaagacactcaatggtaggtgatgcattatcacatgcttcttttgccggtgtagctataggtatctttattggcgtaaatcctatgataacaacctttatttttgtaactatttgtgctgtcttaatagaattacttagaaactcctttaagcagtattcggacttaatacttccaattatattaactctatctgttggaatagctataaccttaacaacaagtggacgtgcaagcggaaacattgaatcttttctttttggaagtattttaactgttggtaaaagtgatctcgtacttatactaataataagtgtagtatctatatttcttatagctatattttataacaactttttatatacaacatttgatgagcaaggtgcaagggtatctggcataaacacaaaatttttaaattacatattttctatcgttgtcggtttcgttatatccgtttcaatacgtataacagggatattagttgtctcttcactattagctgtacctgtagctgctgctatgcagtttaaaaagggatttaagtcaacgcttatattatcaatattatttagctttatagatgtactcgttggattatttagctcttattacttaaattgtgctccaggtggaacagttgcccttacatctgtattaactttaataatttctattattatcagaagaggcagtggcatggaataaagttaaaatataaataaaaggactgaaatttatttttcagccctttttatttatgcaatttattttgtaccgaataatctatctccagcatctccaagaccaggaactatatatccattttcatctaacttttcatctattgatgcgaggtatatatctacatctggatgtgcttcttgtactgctgctataccttctggtgctcctataagacacataagtcttatgtattttgctcctcttttcttaagaagtgttattgcatctattgctgacccaccagttgcaagcattggatcagttactattatgtctctttcctctatatcttgaggaagtttacagaagtattctacaggttttaatgtcttttcatctctatataatcctatatgtccaaccttagcagcaggtattaattttaatactccatttaccattccaagtcctgctctaagtataggaactatagctaccttttttcctgctaacattttacatttagttatacatataggagtttctatttcaacagtttcaagctgcatttctcttgttacttcatatgccattagcattgctacttcttctaccatctctctaaaatctttagatcctgtttttttatctctcataaatgctaatttgtgtaatataagtggatgtgatatttgtgtaactttactcattatttcattcctccattgtattttttttctatttgtgtaatcttgtctattcttctttgatgcctatctccctgaaattttgaatttaaaaatgtatctactatatcaattgctaatccaggtcctacaactctttctcccattgcaagtatatttgcattgttatgttctcttgatgcatgagcacagaatgtatctgtacatacagctgctcttattcctggcaccttatttgctgatatgcttattcctatacctgttccacaaatgagtattccaaactcaaagtttttttgagcaacttcctctgctacttttaatgcataatctggataatcacatgattcatcagttagagtgccaaaatctttaacctcaatatttttactctctaaatgttttataacttcctttttcaatgaaaatcctgcatgatcactacctattgctatcttcataaaaacacctccacttaatacataatcgcaaaaaaagaagataagagtatatgattaaatacttctatcttcatttagttttttaataagtatttttagcctcttttcaatgtctttataagtttgtctgtagatctctacacttctaccatatgggtcagtaatgtcaccctctacacctgtatattcacttaatgaatatatcttattagagttcttctccatttgacttctaagcacgtcacttaataaagatgtcattgttaaaactaaatcacattcatcaactaaaaaagtagtcaactgtatagcctttctatttgatatatctttgcctaagttctccctaactaccacagccgaatttaaggaagttttgcttccatgaatagcagatgcacctgctgaaaaagcttctataccatctatattacacatactattaaacatagcttctgccatacagcttctacatgtattaccagtacaaacaaaaagtatcttcatagcttcctccttaaaatctctataaaaccaagtaaagtgttaatatattattaaaaacttcatcctagcttttctgtaacttaagttaaacatttattatatcaaatccagctgacttatttaacctattcataatagcaactccaaagccttcttcgtcaaaagcttcagaaagtataacatcaacaccacaatcatcaaaatctcttagagtttcaaacaaatttcttcctatagaataaatatcttttctacttccaagtgatattacaatagcatttctataattattctttgtttcatcagttgccattattccaacttttttattgtcatctatataattttgcaccatttcgttaattttttcaatagtttttttcaaatctccatctattattttcactggagcttttggagcatagtgtttatatttcattccaggtgctttcggcttaagagaaggttctggtttagccattattgccgggtctatatacgccttttcatctacttttctaaccatctcaagtgttattgcccctggtcttagaatacatactggattgactgtacaatctattaccgtagactctaatccatattcacacttatttcctccgattatataatctactttaccatttaaatcctctatgcacctttcaacatctgttgggcttggttttcctgataaatttgcagatggggctgctattgatactcctgaaaactttataagctttcttgcaattttatcggatggcattcttacgcctacacttgtaagtcctgcactagttacatctgatattatggattttttctccattattaaagtcatgggtcctggccaaaattcacgcataagctttctagcactgtcactaatattccgaactaccttatcaacatcttcaaagtcagatatgtgaattattagtggattatcttgaggtctaccctttgcttcaaatattttttttgtagcttctccatcttctgcattagcacctaaaccataaacagtctctgttggaaaaactaccagtttgccattttttatgaactcaccagcttcttttagaatttgttcatctacatcatcttcatttaaattaactattttagtgtacaaatttaaacacctcaggtttccttaatctttttaagctgctctatgcattcatcagtaaacttagcctgtagacatactttaaaaagagtatttaaaagaatatattttttatatccaccatttcttataattacataataatattcatcttcaggatgaagcttctttagcttcaaataatacgaagaaatatctggatacttctttaaaaaattcttcccaacaattcttaaatacttatttctaaatctaaatttggttataagtattattttcatgttttttccatcttcttcagtatgaactaaactcactttttcacacacaatattattgttcttcttaaatattccgtcagttatctttactttaaacccatcgtattcgtgatttaaatgattattttttattctaactaatatggaaagtatcacaagcagctctattacaactaaataaattatgtaaaatatattaactacatgcgaatgtactaagactactggcaatgcacaaaaaataaagcacataaaaaggataaacaaactatcgtagctattctgcttttttatggctttatctaaattcacaaaaatcaccttctataaaatcaatcttttgtatttcccatctctttcattttctctgcttgttcagccgttataagaccatttataacttcgtctatatctccatctaggaactgttcaagtttatatattgtaagtcctattctatggtctgttattctaccctgcggaaaattgtaggttctaattctttcacttctatctccacttcctacctgatttcttctgttttcagctattcccgcatttctctctgcttctgctttttcataaagtcttgctctaagtaccttcattgctttttctttattcttaagctgtcttttctcatcctgacatgaaacaacaatacctgtaggaagatgtgttattcttacagcagaatctgtagtatttacgcactgaccaccgtgtcctgaagctctaaatacatctattctaatgtcgttaggatttatttctatatcaacatcatcaacttctggaagtactgcaactgtagcagccgatgtatgaattcttccacttgattctgtatttggaactctttgcactctatgcgttccactttcatacttcatcctgctataagctccatttccctttaccatgaatacaatttctttaaatccacctatatcagtctcgttagcactcataacttctgtatgccaaccttgtctttctgcatatctagtatacatcctaaataagtcagcggcaaaaagtgcagcttcttctccaccagttccacctcttatttcaacaaatacattcttgctatcatttggatctttaggtagaagcattactctaagttcttcttcatagtctacaacgctcttttctaattccttaatttcttcctctaccatttctttaagctcagcatctattttgtccctaagcatctctttatctgcctcaagatcttcctttgcctttttgtattctctatattttaaaactatgttttcaacttccgaatgttctttacataacttttgccattcactttgattagccataactgatggatcacttatctttacagatagttcatcatacttactttctatgaattcaagtctttctaacattattatcactccgtatttatattttcacaataataaattataacatataaaacttctcataatcaaatttgtaaagctttgttacaatccacctcttacggccaaaactactctatccattcttgcaaaatcctttcttgtttcaatagatacaaatccttcattttctaatatgttggagacctcatttgcttcgtcacttcctatttcgtaggcaataagtccacctggttttaaaacctttttactcatagaagttattcttctataaaaatcaagtccatcctctccgcctacaagtgcaattattggctcgtagtcttttacatcatccataagctttgggatttcatcctctcttatatatggtggatttgatactacaatatcaaacttttctcctctctctataggtttttcaagtaagtccccattctctatttttaccctgtcctctaaatttaaaccttggcgatttattttgctgactctaattgcatcaggagatatatcactgcacagtacctctacatcttttgcatatttagctatggaaagccctatagccccacttcctgtgcaaacatcacatacttttttgtaattattaagctctatatattctaaaaccgcttctactaaaatttccgtatcaggccttggtattaaaacacccttttcaacatgaaaatcaagtcccataaactcacatttttccgttatatatctaataggcatttttttctttctcatatttatataatcaaaatactgctttaggctattttcctctatctcatattctctatttgtaattaaaaatattctatcttttttaagcacatatgacagtagaatttgactatcttccatataaaactcatcattagtttcttttagaacagagtacgccttaataagtgcatcttttattttcattgtgcatctgtctcctctatagacttttcttcttcatcataatctatgccttcagcaacccttaaagcttttattgcgacttctagttgatcttccgacggttctctagttgtaagtctttgaagcattagtcctggataagatagtattttagaaaccttactttcgctttttcccatccattttataatttcatatgtaattcccgatacaagaggaagaagtataattctccatattattctctctggcagagaattccactttgcaaatgaaaaaacaataatacttactatcataactaaaaataaaaagtttgtaccacatctaggatgaaatcttgaatactttgaagcttttgatggagtaagttcatcctccttctcatagcaaaacacggttttatgttctgcaccatgatactgaaaaaccctttgaatatcccccatcttacctataatgaatatatacattataaatataaatactcttattacaccctcaaaaaagtttaatatcacagaattattgctaaaccttgaaaataaatttgctaaaaaagtgggaagtataaaaaacaccgccactgcaaatacaagtgataccataagtgaaaatactattaaaagatcatttgccttatcacccaaaattttttcaatccatttatcaaaatttgaaggtttttcatcttcatctccttcttcacaaaaagaagctgaataatttaatgtattaatacctacaaccaaagattcaataagcgatacaaatccccttactatcggcaacccaaaaaacttatttctctttgtatatggaataacatctttaaattccaccttaatacttccatcaagagttctaactgccgtagctattcccttggcacctcgcatcataacaccttctattactgcttggccaccgactgttcctttcttactcattatatattacacctcttttttttgtggaacaacatggcatttcctacatcttgcttcataagactccattgctcctatcaaaaccaccggatcatcataaaacgctggctttccatttattaacctctgcgttctagttgctggatttccacatacaacgcatattgcctgaatcttgtctacaaattctgcaatagccataagctctggtataggtccaaatggcttacctctaaaatccatatcaagtccagcgcaaattactcttctaccactctccgcaattttatttacaatttctactatttcatcgtcaaaaaactgtacctcatcgattgcaattacctctgtatcctcctcaaaatattttaatatttctctactatttttaattgcaactgcctgttccttctctcccatatgagaaactacatcttctttactatatctgttatctatttcaggtttaaaaacttgaattttttgttttgcaattttagctcttcttattcttcttataagttcttctgatttcccactatacattggtcctacaataacctcaacccatccgtggtcctttggtctgtacataaaatattatccctccacatggaattttttatatatgaatttagttcatttcttttacattgacattaatatatattctatcaaatatgttggattaattaaagtgctttatttcgttctatacaaatttattgactaaaatacctgtagatgttataatatcatagttgataatgtagatacttagagaggtgaatgtaatgcaaaaggatatacaacctgaataccatcaagatgcagttgttaaatgtgcgtgcggaaatactttcacaacaggctcaactaaaaaagaattaaaagttgatatttgctcaaaatgtcatccattctttacaggacagcaaaaaattgttgatgttggtggaagagttgagaagttcagaaaaaaatacaacttgtcagcagacaaataaatcaattatttagagaaacggagttaattataataataatcttcgtttctttgtttttttgcatgattttttaataatataaaagtgaagctttgacttatactttcaaaacttcacttttatgctgcatgtaggtatatactctaacataaattattattttttagataaccttaactcaaaccttacattgcagtatttattttttcaccattttcccttattgattacatttacaatttcattattgttctcagtctcattaagcatattaataagcttctccgtaacatcttgagtactattattgctatagagcactcttcttatcttgaatgcagcttcaagctcatcatgacttaaaagttcactttcttttcttgttcctgatttatatatatctattgctgggaaaattcttctttcctgaagtctcctatcaagatgaacttccatatttccagtacctttaaattcttcaaatatcatatcatccattctactgccggtatcaattaaagctgttgcaagtatcgtaagacttccgccttcttctatatttctagcagctccaaagaattttttaggcataattaatgctcctggatcaagtcctcccgagagggttctaccagttggagttattgtaaggttgtatgctcgtgcaagcctggttaaactgtctaaaagtataacaacatcttgaccttgctctaccattcttttagctctttcaagtaccatgtatgcaaccttcgtatgatgctctggttcctcatcaaaggtagaatatattacttctccctttatacttctttgcatatcagtaacttcctcaggcctttcatcaatcaaaacaactatgagtttagtttcaggatggtttttagctaaactttgagccacacttttaagaagtgttgtttttccagccttaggtggtgctactataagtcctctctgaccttttccaatagggcttattaagtccataagtcttgttgcaagttcatcactatttttctctaaacttagcctttgattaggatatataggagttaatttttcaaaaggctctcttctaacagatttttcaggattttcgccattaaccttctcaacatataaaagagccttaaacttctctccctctttaggtattctaacctttccttggacctcatcacctgtctttagattaaatcttcttatctgcgaaggtgaaacatatatatcttccgggctagttaagtaattttttcctcttaaaaatccgaaattattattttcaactaattcaagaactccctttgctgaatctgattcatctaccatttctttaaatctttcatttttgttttccttttctttctgcacatatctattattattggtatatgttttttcagcaggtctactgacattaccattactgctctctgacgtattacttttctccgatagatcatttttaggttttatattttccttaagcataattccgtttttttctatgctgtttggagattttttatttatctcatcaattaaatcttttttcctatacttagatacattcctaagtccaagctcctttgcaagttccttaagatcattaacagtcatactttccaagtcatttaagtcattattaatcaaaaagtaagcacctccaataatttatactgtaaaaattatttgcaactttattttattttcaatacataatttacaaacaaagcaaattacatttaatatcgggaatttatcaatacatagaatcgaaaagagaagacaatattattccaggatggaataatatttaattgaaatatcaaaaacggtatatgttatctataaagtttatacttaaaacaaataaaaatcaagtaccataaaatattatatcatcatatatgatttcttattaatttcagaatacttttttactctataccctaccttatctggttctcccataaacataaccggtaagcctaaagtttcacagccataaatgaacatttccttcttaaaaacgtcccagaggttacaactaaatttgtgaaattcatcacatatagggcatttaattttaatatttattcttttattttccacataaaattcaaaatcctcatataaagcattcaatttctttatttgaaaaatagtaagttcatttatattatatccaccatatttattcttaattgcaatagctatagaagtgttaaatgtcatattttcacctccatactttattttgaagcaaagaacattctccacttatcaaatactttaatatttactagttaataacagttcaactactaaattaaacgaactgcttataataaataattctataaaaccacaagaaatcctctaactaaaaaaaattttgctgaatgaatcagcaaaattttatatatactagactagttaggattagatttataccaatttccatccttgtaccattcttctcctgatacatcaaatcctggttcattatgccctggaatttgatttaccccatcattaaaaagcacctttgcactggtacagttatcaattgtatatgaataccatccattaccatcatctttcatttttgctcctggccactctggtcctgtaactccacctgtagcatcatagaaatatatattaggtgctgcccaagtacttatatttttaaagtgaaccttcatataagtattatatttctcagtatatacctgtgatttatcaccactcccatctacagccatgaattcaatagtcttacttgaatctattgtaataggacctgtatattttgtactatttactgttggcactgttccatcaatagtataataaatagttgctttcgcatcacttgatgtaagagttaatgtctgacttccagcatagcttccaccttttaaacttggtgaaacagttatatcagggttatattgatataatgtcccattttcataccattcttcaccagtaacatcgattactgaacttttatttgtttcatcattaaatgtagcttttgctgctgttgtatctttaatgatatatgagtaccaaccattaccatcattgttcattttaactcctggccagtcaggtccctttactccacctgcagtattatcataatacacactaggttcactccagttagttggatttttataatgaacctttatatacgtagtatattgctctgtaaatacatccgactcatttccattagcatctcttactataaatttaagtgtcttacttgagtctattgtaatagggcctgtgtattttgtactatttactgttggtgctgttccgtcaagagtatagtatatcgctgcatttggatctgaggctttaagtgaaaccttttgaggtgatgtatatgttccaccctttacatctgcataagctgttaactgcacttggttacatggtacatttatattcttatcgtgtccagcagaaacttttatatacacaacacttccataggtgtccgtacctactacatatccttctccttgagcattttttagttcatcatagcttgcatatctagttattctacgtcctcccacagtaacatctccgcttgattttacatgcattttaactatataatttttcaaatctgatttataatatcccgttttgggactgatattaaattgtacagactttaagtccttagctctttcaagtgtcatcttttgatcaaaataagaaccattttcataattataactagttccatcatcatcgtaataatcaaagcttgatgcctcattgccaggaaaagcgtctacataaacatcagttattttcttttcacctacatagttttcaaagtcttgtgtaggaataattgctccgctctttataaataaaggtatatcactccaattggttgaatccacagcatagtttatagtttgtccacctgtatattctcttcctgttgtatagtctatccaatttccttctggcaaatatatactctttgaagtttgaccttcttgaacaacaggtgatacaagcatgtaatctccaaacatccaagcttccttatcatttgctgcattagaatcattaggatattccatcataagtgatcttacaagtcctaatccagattgtgatgcacttctatcatatgaatatatatatggtattaaagtgtatcttaactgcatagctttctttgcagtggcctctgcagttgaaccaaatgcccatggatagcgtaccttattatcttgaccatgaactctaaatataggtgtaaatgcactgaattccatccatcttgcatagttttcaggtgttggatcccctccattgaaaccacctgtatccattccccatttagcttctcctagattaactgctgaaagcattctttcacgttgatttgccatactatcaaaaccagtagatatatcaccagaccacattccataagaatatctctgtgctccagcatagtagtttctattaagtgaccacactctttgatttttgtgccttctttgaccatcatatatagctctttccatattcatattgccaaagtttccaaagttaacattttcatcacattcatcattccaaaaacctacaatacctttatcaaaagcgccttgaatgttattccaccaccattttctaacttgtggcaatgcaaagtttacattttccatcattttacctgaacagtagtctgaagcctcactatcacctggaagccaccaaccctttgatgttacatatcttccctgctttgaatctgcaaggattcttggtttcattatacctgtcatcttaagtcctttagaatccatataagcctttaactgaccattttgcgaatcaggaaaattatctgtattccatttaaattcaccgtaattatcttgtccccattttttccagtcaaaatcaagacaaaagttatcaataggtagttgcttagaacgataagtattgattacacttttgagttttgcctcatcatttccagttccagatagcgaattatcccagccccattgagtatttgtgaaaccgtttgcccatttaggaaacattggtgctttaccagatacatctgattcttctgataagatttctttaggattcccaaccattacatagtagtctgtatctgtttttgaaattccatcatatttaagtgatgtatccccaattgtaaagcttcctccatctgaatccacaagtaatccataaccatcattgctccatacaaatggcgaaccgcagtgtccttgatatccagcataaacagattctgtaccatttctaagcattcccttacttgaatcttcctgaaaattatatccgtttattccataaaatctatcccccgaattatgagtaaaacttgcagtcttactagctgtagaatcctgttttaagagtaattttccctgaagatcatatactaaaatactcaaatcctctttgtttatttttaaaaccattttcttagttgttataaccatagggtctgatttaatatcactggatactatattgcctgtactccactttttattagggtctactactaacgtatccttacttgattttccatttggtttataatcaactttaaaaacttgaggttcacatatcctaattattgtttcatctttacctttttttatttttaatgtatttccatttaattttgcatgaaattttttttgtgaagatgattttgaatttttattaactaccttattagtatctgcttttacgtttatatttaaggcttgaggcatagcacttactactaccgcagcagcaacaagacaatataaagtccttttccatatacgtgtttttgaactattatacattatattttaccacccttcattatttttataattttttataattcaagtgatttatttatgcaatcgttttcccttatagtaaattttgtctccattatattagtttttattaaacgttttcacctcctataacataaactagagacctattcaagcattatgtaccttatatgctttattttatacaaaggtttaatttcaacttaattatatactgtttacctaaaattgtaaataccttttttaacattttatttcatttatgtatattgttcaaatatatatttaattctatattaatcttagtaatcaaagtaggttactaacgcaatgtaatctagttattagtaaaaaaagcatattttcaaaatgaaaatatgctttttttaatattttatttttcttttactgtacacgcaacttttataaaatccctgaaaagagcatgtggtctatttggtcttgatttaaattctggatgaaattgtactccaacaaaccaaggatgatctttaatttcaactatttccactaacctatcatctggacttgtgcccgcaagaattaatccttcttcagttaatctttttctaaactcattgttgaattcatatctatgtctgtgtctctcatatataacttcttcttcatatgcatcataagcgtttgtatcttttgataatttacatgcatacaatccaagtctcatagttccacccttgtcatctatatccttttgatctggcataagatctataacagggtattttgtttgtggatctatctctgaactatgtgctccttcaagtcctaaaacatttcttgcatattcaattacggcacattgcattccaagacatattccaaagaaaggtattttattttctctagcccatcttatcgcttcaattttaccctcaatacctctatctccaaaacctccaggaacaagtataccatcaacatcgcttaatacactatcaacgttatcctttgttacctcttcggagttaatccatttaacatttacagaaacattgtttgcaaaacctccatgatttagcgattctactactgatatatacgcatcatgtaattcaacatattttcctacaagtcctattgtaacttctcctgaaagacttttaatattcttaaccatgctttcccactcagaattgtccacttcttggcattcaagttctaattttttacaaactaaagaatccaatccttggtcatgaagcattaatggaacttcgtataaattttctgcatctagatttgaaataacagaatctccatctatattacagaataaccctatcttgcttctaacatcttttgatatttctttttccgttctgcaaactataatatctggttgaatacctattcctcttaactctttaactgagtgttgagttggttttgtttttatttctcctgcttttctaagataaggtaaaagtgttacatgtataaaacatgaatttccaaatccaacttcatattttatctgtctaatagcttcaaggaatggaagtgattctatatcaccaactgttcctcctatttctgttattacaacatctacatctttttcttttgcaactctatatactctctctttaagctcatttgttatatgaggtattacttgaactgtacctccaagataatctcctcttctttctttatttataactgaccaataaacttttcctgtagtaacattactatttttacttaaattttcatctataaatctctcataatggcctaaatccaaatctgtctcagcaccatcatctgttacgaatacttcaccatgctgatacggactcattgttcctgggtctacatttatgtaaggatcaaatttttgtattgataccttaagccctctatttttaagaagtcgtcctagagaagctgctgttattcctttccctaatgacgaaacaactccacctgttacgaatatgtatttagttttcatcaaattacctcctataaaaatttattatatactccaaaaaataaaaataattcaatttattattgacaatatacataaataagtatataataaaaaatacactcacttatgtatatagtcttgtatgtagtatttttttatttttaacacatgtattctattttatcatatatgtgtttttttttctacttttatttttaattttatttaatgattatattatgtttttgacctcatcatcgattctaaggtacatttccctgaattttttattaataagaaacttttctttagccttcttataattgtataccatttgttttttactaatagtattcaagtcattagttacattttcaaattcaactccgtatttcttcatcaaaagaaaaaacgtatacttgcaatccttatcccttaaaatttcacataattgttttgatgtaattcccttatattcacatatagtttctattatcttctcgtaatcagccttaaacataaaatttaacccctttctatataaacatatattttaattattcacattaaaatccataattaaacatattacatagaaaaaaggcaccacactaaagtgcctttatggttatatctatattagtagtttgttttaattgatttactacgtttaaatcatatataattttcacatctccaccctcatcacttacatctatagctatttctttagtccatatctcaagctccatcgtaccatatggtgtactgtatatagagtagttctttttatccttttcaaattccattttagtcgaagtagaaccgtgtctaataatagaacatttatcttctttaatctttagtgtagtagtagttccctccatacctgatatctcggtttccttataagttgcataataacagttatttcttttataaaagtcccccggcgtaacaacttctattggtttttcatcctccgcctgctgacttgaaatacttataattgcccttctatccattaatatttctcctattttaagcgttatttctacttgctgcaagctctattaactcatcaataagcttactgtaatcttttcctgctgctgcccataatttaggatacatactgatacttgtaaatcctggaattgtattaacttcgttaagatacatctctgttgtatccttatcaacaagaaaatctactctagacattccagaacaatcaagtgctttataaacctctatagcaatattctttattttttcaagattttcgttgcttaagtttgcaggtatcaaaagctttgatgctgcattttcatactttgcttcataatcataaaattcttttgcaggaactatttcaccaggaatagctgctttaggttcttcgttaccaagaacagcaacttcaatttctctagcattaagagcttcttcaacaagaatctttctatcatatttcatagcttcttcaagtcctgcttcaagttctttcctattatgtgcttttgttattccaacagaagatccactattagaaggttttataaatactgcatatcctaatttattctctatttcttttattatctcttctttactagttttatattcatgtgcatgtacaactacataatctgcttgttttatattaaagtgttcaagtacgtattttgtatatactttgtccatacagactgaagatgatagtacgctaggtccaacacatggtacacctacgagtttacatagaccttgtatagttccgtcttcgccatataaaccgtgcataactggaaatacaacatctacctccttattaaataatattgcttggccatttgggcttttgtaaaattcatctttttcccattctccgttctctattttatctgcacttcctgtatattcaaaccattcaccctttttagttattcctatagggaatagatcatatttcgatgtatctatatttcttagaaccgaagctgctgatactcttgatacctcatgttctgttgattgtcctccaaataatatagccactttctttttcataatatcgctcctttaaacatttcataaaacctataattattataatatactaatttacaataaaaaactaccacaagatagtttataaaactaccttgtggttctatatataatactcataatacttacattatggattataaaatattcctgcataaaagcttcgacctcagaatcttttatatgccagaatgttttagctttttgcgtaattatatacttaatacttagaagcatcaacattacatagttaattttccatttggagtatttcttatttgaagtattctagtttcatatcctgtattggcatctatatattcaacgaaatcttgacctttatagcttccaacaaactcatatgtcaaaacttctgtattggtttctgttggaactactgcaagatttacacttgtaatattaagccttcttccaactttagtttgtgctgtttgctggcttactttaggagaaccaaaatttctagtatctacatgagaagtaagatactttttagcatcaactccaactatgcttccatcatctaatgacactttaagttttatcatatcaggataaacagatacattattttggttatatatataacttataacacctacattttcataatttaaaaagtaggtagacttcatattcttgaatcctaaactattaagataatttatacctatatccgtagcttttttcatgtctatattgcttttactaacagttttattatcaagtagggtaattaactttccaccatgttttgtaacctcgcaccttactctacttgcattcttatctctaccctttatagaaacgttaaatgcatacataggtatgccagctttaccactatcagttgtttctatgctttttattctattttcaccaattgcttttctaactacactttcagcttccttttgacttaccactcccattgaattaaccttaggtgtaatttgaagattgttatctgagaacggaccatcatatataagtgctggatactgggcagattgtttttgaatatttttaaaactatctgatatattagctccgttagcggaagcaagtactccactcatttttcgtcttatttccccccagcctactcttcctaaatttatattattttgtacatcctttaactgattctcaagactatctgcttgatttcttaacctttcaacctgggatatatccgaagcacttaattcctctcctttagctgatttattttcaagaacatagcaaaaatctcctagttgcgatataaatttgctagtaccttgaagctgttcctgcgcaataggcatggagtggagcttatcatttgctatagtcgaatatctatatatatctcctagcaccaaggtattctgttctctagatccaagtattggaactttagaaagatccgcccctatattttctactgaatctataagttgatacatacttttatcgtattctccctgaagataattcctgtaatctgttctttctaaggtcataagtatagcataactagtagaaaaaactactataagtgacaccgctaatgtatatgcaattcttttagcactgcttttcatcattaatacactcctctgtttattaataagcttttgcatatagtttttatttttcgtgtgaataatatacctattaaccattaatttttcaataaataattttgaaaggtatttataatttatgtcatattatatataattaaaagtgcattaatattttaaaatgtagatcacttatagcacattttatttcaagactaatattgaaaggtgaataacaatgaaatttttaattctttcggtttcggccggcggtggacatattcatgctgcttttgcattaaaaaagtacatagctaagtatctagaaggttcacaagttaaaatgctggataccattaaatatttaaatccatttttagataaagttcttataggtggttacttgaagaccttaaaagtatctccagcactattcggcaaactttataattttactgaaaaggatgataatcttgcttcattaagtaataaaataaatgaatttatggcatacaaacttattcctataatagaagattttaatcctgatgtaattatatgtacacatccatttccaacagagatggtttctatattaaaatccaaggaatccttaaaaactcctatgctttgtatccttactgattacgcacctcacagtttttggataagaccacaagtaaattcatatgtggtttcaaattcagacatggtagatgagatggttaggcgtggcgtgaatcgtgaaaatatttatgatctaggtataccagttgatccagattttataaggaacttcgataaaatagaaacattaaacgaactaaatttatccttaaataagaaaacaatactaataatgggtggaagtcttggaataggtaaaatagaagatatctatgaagctttatctaaatcaagagcaaatattcaaataataataataacaggtaataacaaaaagctatattcaaaacttctcgaattagccgaagattcatatgttgagacaagaatattaggctatacaagggatgttaacagatatatgcaagcatctgatttacttcttactaagccaggtggattaactataacagaagctttaatttgtagggttcctttagcagtcttctcacctataccaggtcaagaagaaaaaaatgaggattttcttttaaaacataatcttgcaatcagcatacgtgacagtgaaaattgtctaggtattatagaaagtttaatatctaatccagaattacttcaagcaatgaaggataattgcaataaattttcaaagccttctagcggaaaagatatatgtaatcttctaataaacttaataaacaaaaatcaaaaaatagacgtaaacaatgcagactatagaaattaatctgcattgtttttacttttatttaaaataatcacttttccaacttattaataaccttttttacttcttctactattttaaatttaactttaatctttccatcatctttagaattacatacaactttatactcttcaggggttagcacttttttcatttcagtgtcagttttttgctcttctaccgctcctcttgttatgtcagtaaaacacagcggcggaaacataacacaccaccaattatgccctcttgcttgtccaataagaatcctataagcctcatactttccctccggcaatactatgttaccataactttttaccgggaaatcaacctttgctagctcagtatttactttatactgatatccattcttttttataacggaatctgctatcctttttatacttgagtcactattaagtaacaccttccttgactgatttatgtctttgcaattttgaagcttgggcctcatatagtttataactgcatctctaaccttcagtttaaggttctggtccgcatctgaatcgctgtttgcaagaacatgaaacctaataaccttcttagctatactaatttgaatattatccttatttaatccagaatcactatatgctaaaacatagttcatactcataaaagttatataaaaaatcgcaagtataattacaataaaaattttctttttcataaatcttcctccattcatttaagattatttccatttttcgcctacttattcagtagcagttataaatatagaaaacaatttatcctattcttgtgtatgccttttccttatattaccacgttataattcctttttatggccataataataaatgaaatttatgagttttatcttacctgcattaactttctacattcacctaatgcttcaaataaaaaaacattttcttttgaaggtgatttcatgattaaatacaacagtttacctttaataaaaaaaatatacacaaaaaaaacaccagaagaaatacgtactatcaacgtggcgcttttttcaacacttttattagaaagcggtattatatgtgactttttaagaagccggcgagaacatttcctaacctatgtattcttaagtatggtaacagtaagcatatcaatatttttaattctgctgtggaaattttacgaatacctgctattaaaaagatgtgaattaataacatacatagtgcgagagggtgattcacttatagcaatatctcaaacatgcatgcccgagtgtaatccttggaaaacagcttcactaatcagaaacataaacaacataaaagacttcatatatgttggacaaaaaattctagtgccttcaaggctttaaaatattttatactttggtacatattttataataaggttataaacatattctttcattttttgagaatcttcatatgtataataatcattaatattagaaaatttatatccgaaaatatttccatacggatttaattttctaattctttttaaatgttctttttttactctaaaagtatcaatatttatatcccttattttttgttgattcacaaaactaaatattttatctataaaccttttgtagatttcatcaaaattatttattttcattattggttcaatagaaagtcttatacgaactccttttgctgcagcttcatttatacttttaagcctgctatttaaacttggtactttaaattcatatttcttaataacttcgtcaggtaaaagagaccatgcaaatataacattatccggtatatcaagatgacttacgcttttaaagttagcactcttagttcttatttcaataagcatatccttatttcccctagctgcttgtatccacttttcggcaaatccagtaagtttttcaaatgctaaaatatcagaatcatatgaaatacaaatatatattcttttatccttgctttcttttgccgctcgttctataaaatcctctatatttataaatattactacattactagatgggtataatccttttaaataacaatactcacagtcatatatacaatttaaaatacttgatgaatagtaaaagttctcttgtccaaagttttcacacatatcagagccattatatataaaattactttttgcttttgcaagtataagcttttgagaatacttttgaacattaaaattttgttttgttctattaaaaacatccttgtaattatctatataaataattttactgtcggggaatttttcaataatttgctttgttttttttaaattttttatttcattctccacatatatatgcgaaaatttattttgcaaaatagcttttttgtttttacttccacatgctcccaatgaggtttgaaaaatattttctcccatcatttttaatcttcacttccaaacttaaaaatccttcaaaatcaaattccttcccatttctaatcttataggcaactgcagcctttttaagctgtatactttgactttcagttaacctaagtctactaacaatcttctcaatgtttccagtacatacatcactcaaaaaatttttttcatgaaatatcctcttataattttcaatataagaatttattttttccatgcttttttttattaagttcctcactaattctccacttacatttacattattagcattgtcagaaactatttttattagagctatctcatgcttctgaaaaaactttgatgcactttgaaaaaaagcacttccctccatatcacatacgtcatcaacctgaccggttgtaacaggtatggaaaaggtttgaaggttgccctcttcaaaatcatgttttaataaaatatctggataaaattccttattcgtatcaacatctttaatcttatttataaaaacgcactctcctacagttctacttctacttccgcatatacctacatttacaaaaagatccttacttaactttgattttaaacttcctatatatcctacagcacatgcagcatttatcttacctgttccactgattataagcttaatctcctcagaagaaaaaatctgaaaacttgaatgaacagcctcctttcttaatttataataagaaattataccttcagcctcaccataaaaactacacaaaaagtaaatcataacctataccgtccttgttataaatactttattatattcctttttcatttcataaaaatatttttcagcttctttagtgttatcaaaaaaagaaaaaaccgttggtccacttccactcatcattgtacctatagagttatattctagagctttctcctttatttcatttatctccttatattttactgctgtaacattctccaaaacatttaccatattatttacaacaaatttaaaatggccattatttacagcctttactagcccttcactatcaggatgcttaacatctaaacatttgtcatactctgtatataccatctttgttgaaactccaaagtcaggcttaacaagtacaattatcttaccattcatgcttctgagctttgttatcttctctcctattccttcacaaaaagctgtacctccaactatgcaaaaagggatatcagcgcctattttaactcctaaatttataagttcttcatctgaaacgtcctttttaaaaatatctctcatagctttaagtacggctgcaccatcagcacttccccctgcaagcccagctgctacaggtattcttttatttatatgtatacttattcccttatcaattttatatgtatccatgaaaagcttagctgccctataagctatatttttatcattagtgggtatattacgcctatttgatgtgatttttattccctcatctatgattcttatatctaaaacatcatacaaattaatgctctgcattatcatctttaataaatgatatccatcttctctttttcctataacatcaagtgaaatattaaccttagcgtaggctttaacattcattttcatccctccaattatagattatattatatcatagaacaaaaaatatataaaaaatgtctcaaagttatcaattttcttagtaaccttgagacactttgttttagtataaaattatataacagcccttccgggtattatcaacttttgacctggtgctacaagattttcatcctcgatgttgttagctttaactatactctcaacagttgtagcataattctttgcgattttccaaagagaatctccatcttgaatacaatatatagtaatacttgcttttttctcaggaattccgtcctctgagggttctacatttactataaaacttctatcattttcataactaaccttttgatcaaatgatattagtgattttatagctatagtattagcctcaagcgtactttcaatattctcaatattagctcttacatcacaaaccatatctattttgcatccttctatctccgctgaattagcgaaaggaatatcctcatttagagcatatacattattatctttatccgatgttctgtaaagcaccgatacattcagtatcccctctatagaaactttgttttcaaataccttcttatcagtaacaataactttcccatatgctgcaactattcctgatggatttggatactctgaaggaacctctatattttcctttactatagtttctgaaaaagcatgttctttaatcatatttattctataatcttttttcttaacatctaaaactgtttctggagaatatacatcatctattgagtttatctccattctattaattactttagcatcacatttaacaattgcctctgtagatattattctattttctcctaggtcatcttgtttcacattaaactcataagcatcaactctaaaaattgaatcattgtccatagtagggtctgaaccatctatgctttcctctccacttatctcaacatcatctgagatataatttatttgtcctgaatcctttgccttatacaatatttcaaccaaagcatttgcatttgcttctatttttccatctgatactttaacattttttttatgaacactcacatcacatcttaatatctcatctatctgttctttatcagatggtatttgtatattagattttgcaattaaatcaatagtagttttaccaattatattatctattttagttttatttcttaaaaattgaacttccccaataccaactacatcttttaccatttcaatttttgacactttattgacttttccctttatttctattatgccctgaacgcatattttcctttcatttacaatattgcagttcatatgttctacatatggttttacattgcaaatcatatcacgctcacaattaactatatctatataattagagaacttagaggtatagtttaccccatatacatcattttttgaatctcccgttcctaaatatattacattaaattccacttgcccttccacatatactttatcttgcattatttctgtatttataattttgggctttgcatccaccataagtatctgttttacatccggtctagtatccggtataacatattcctctttaacaacagtatcaacaatattttgtccaactgttttttcgtattctatactctccatcaccaattcagctgccatagttcaccctcctataaatatattttttgaatataaacacacaatttatctgcatattataatctatataaacacgattaaaaatatgatagttttaaatatgttttttatatttatttattaaaaatttattattataggagtaaggatacctattttataagcaaattcaaggcatatttattcgacatattatgaccactttcgcaaaattgcttagcttttatctatataattacaaaaaataaacttgacatttttaaatatctatagtaacatagaaattggttattgaccatataacctctcataaattctcaatacccttttataccatagttgaaagatggattcaaagccatctttctttttttatattctaaaaaaaagaaaaacacaatataattactatcattatatttttaacaaaaataagtccataaattaacttattgcaattccaatatcaattaacaataatgatcttttaaaatacaataaaaaataaaagcgataccattaaatagtatcgcttttttttaatcatgcaccaaaaacaatttgcactgatttagttaacacatctgaatagctatatgtcacagtcctttgggtgtcgctctccaatctaactacaaaaatacttggataagtcttttctataactccattattaacaacaatcttttttcttccaccatttgatttaagtgtaactttctcgccaacatgattttctatgctagctttaattgaggccaaaccgttttgccttatcacaaataacaccctctttcaatagtaactattatatagcaaatttactattttgtcaaggaaaactactattttaccagtaatctatagggattgtcaaggttaattttttataaacatatatatcctaagtaattttatagcgtctagcttttattttcttgtccattaagcccttttacattatattactttcaaattacttagattttatttttaataaaatgttacctttttgaaaaaatttattaacgctttttcttatatgtatttatagtaatttaactattagccgtaaaactataattatttcttttgaaaatttttttaaaaaatgtaaatatcaattttcaggtaaaaataagcaaaagaattagcaatgccctattaatataaggcattttttttattttattaaaaaatttcatatgtaatttaaagggagcattgtaaaaatgataaaattttttttaaacttctccctttatataataacataggactcctaagtcattatatatatgatgatttaggatacccttctctgcacttacctcttgtttgaagtccccctataccttttactccagttaccgtacctttaactacctcttttatattcactatatctccaacatttgtataagctaccttttcacatacaaaaacaggatccaaacagtgaattaaaactctcccaggagaactagcataatttgcacctgcatctaaaattccctcatagcaggattgacatgcacctgcaaaaataacaagatcatcataacttggttcataatctcttaaatttgaaaccgatttgataaaatatgatgaattcctgtaattatttatatccatataattacgagtatttttaaccataccatcatgtcctgttactactactatatcaggtttaactaccttaactatatctactactttttccggctgctccttttctaatataaccttacctaccgcatctatggatagctgtttatatacttttagacatacctctaaatactcagaatctccatctatatgcagtactttcccaggtcttgcaaatgtcatattattaattccttcactgctatttgacgttctcattttttttttcttatatgttttttgtaaaatatttttacctattttaattgaatttgatctttctgttattatatctcttatggacttatttattgtttcattgaatacactatcgacctttccttcattacttgcctgaacaagccttaaatcatcttcaggggaatcagctattattctaagattaactccttttaggacacaataatttactcccttatcatttattatgtctataatcttaaatgttatatcctctccataggattttctcacaacaaaatctccgataaccaaaaaatctcaccccacagtattttcacataatatactatgaaagtgagacctccactgttacatttactattggagattatatgcctctctaaaatcttcgatgaacttaatgtatctttctctttcctcaataagttcctccattttattattaaaagtattttgtccccaatttacttcattataataatacctgttagctaacctccaaaatctttgaggaaatattaaaaatgcataaataacaccatactcatcgtcatccaattttgaaatactactataggaatctaaaattaattcggctgttttcatactccaattagatctttttagtacctttatcataaaattggaaatatcatatgctcttaattctcttttgcaatagtcaaaatcaattacgtatacattatcttcattatttattattatattatgataagtataatcatgatgacaaaaacctttctcttcctcagcaactgcacataagctctcatactttgagtttttaagtacattcatagattttatgccttgttctttaaagaaatccacatttttaatgtaattcatatcaaaatcttttttattgcctttctttcttgccatatcacgcattttatccaatgctttaacccttttttctattaagtgaggccaccttcctaaatcgcttttaagcttactattttccggtggctcatacccttttgaacattcatgcatttttgcaagagtctttgatgctttaactaaatcctctgtgtcataaaagctgcattctcttccttctatccattctgataacgtataaatatcttcatttacaagtgcatatggattgccttctgtgttaagacaatatttatctacatatttaaaaccattatttataagatgttcctttgcagcataaacaaacaataatttttgtataccgtaatttattttcttgagacatttgttacccttattcgttttaacaaaatatacacctttattaggcttgatatattcaatttttatattgaactgtctctcaatttcaaattctctcatcatttcacatcacctccaatacattaaatttatatgtactataaaaccattttagaagagaaaaatatcttttatactgatgtctatgtttatgcctaccataataattattaaattttctttaattggataccaattttttaacataagcatgtaccataatttcttgatgattagaattttggtatgtactcaatttaggcttcgctttagtttctccttagtgaaaactgctctactataaccctatgtatgtaccataattctttgatgattagaattttggtacatacttaggcttagtttcgcttttggttttcactgtactgaaaactgctctactataaccctatgtatgtaccataatttcttggtgattgaaattttggtatgtactcaatttaggcttcactttagtttctccttagtgaaaactgctctactataaccctatgtatgtaccataatttcttggtgattgaaattttggtatgtactcaatttaggcttcactttagtttctccttagtgaaaactgctctactataaccctatgtatgcaccataattctttgatgattagaattttggtacatacttaggcttagtttcgctttaagttttcactgtactgaaactagttcgactattaaattaagcatgtaccataatttcttgatgatttaaattttggtacatgcttaatttaagtctcactttagtttcactataattaacacttttttatttattttaatataataagattgtagtactttatatggagatattttatgaaaataggaattgacggcagagcagcaaagtggtatcgcggaactggtataggtacctatacttatcaacttataagtcatataaataaattagatgaggctaatgattatactatatttttgccagattcctcaaatctaaatttcaaattaaagaataactttagtttaaaaagtataaactgcacagcaaaaaataatttttgggatcaggttaatatacctaatataataaaaaaggatgatacagaattatatcatgttcctcaaaatggcattggattaccttataacaaaaactgccgttttactataactcttcatgatattattccatataaaatgccggaaactgttgggaaaaaatacttgaaaattttcgaggaagagattccaaaaataattcctctttgtgatggtattataactgtatcagatttttcaaagaaggatatatctgaatttttcaattatcctgaaagtaaaatctacgtaacttatttatccgccgaagatatatataggccaattgagaaatgcatatcaaaagatattataaagaatctatatggaatagataaaaactatatattatatgtgggtggttttagtccaagaaaaaatatatctggaataatacacgcctttagtaaactaaaaaaaactacaaaaacaaatttaaaacttattattgcaggaaaaaaaggactatcttatcctaattatgtagatatagctaaaaaacttaatgtttcatctgatgttatttttccaggatttattccgcttgagtatatgccatttttatataatgctgctgagtttttaatatatccatccttttatgaaggttttggactacctcctctagaggctatggcatgtaaagttcctgtaatcacttcaaatataacatctctttatgagatatttaatggctgtgcgcttatagttaacccttatgatgtagaaaaaattaaagatgcaatggaaataatgtattttgacagttctgtgagaaaaatttattctgaaaaaggctttgaattttcaaaaaagctgacctggaacagcactgctatttcaacaattaaagcttacgaaaaaatttcaaaaaattaaataagtgaagatttttaaagcttcacttattttacttatctaaattttcaaatcttctttaaagttttttagaaattcaactctattttcttcatttgccatttttcttttcattttatttataaactcttcattggaccagtcttttcgttttgtataatagcttttcacaatttcataaaaatcctccggaaaactcaacattccaaataatacttccatctcatttttactaagagtatttgacttacagtaatttgatataattatttttgaattgtctatactataattaaatactttcgcagcttttgatattatattagataaatcgtgcacttttaaatctattattgcataatcaaaatctataaaatatgcttcttcatcttttattattatattgtgatgtgctaaatcatgatggcacagcactattttatcttcttcgctgcataatttataatattgacttttattcataatatcaatacttttatcaatttgctctaaataataatcaacattttttataaaaatttcatcaaattcatttaaactttcatataagtttaccatcttttttaaaaagtttacttcttcttttttccttttaaaaccttttatcatttttccacatatatttttactagcaattttactatacctaaatccctctgacgcactatgaagctgtcccaatccaaatgaacttatgcttaagtcaactggattactgaattcacattcttttccttcaatcatgtccataacacaatataagtctccattttttatacagtagtattcaccactttgtgtcttattaaaatcaattattctattaaattcattttcattcttaatataatttacggctgctaaaacaaatttaaattcttcaatagtatagtctatttttttaagtatcttttcacccttatctgtagatattaagaatgcttttctaagaggcattacattatatacagaaaagttaaattcattaaatagctcaacatctaaatcataacttgccagttctttttctctatatgattttaaatcaagcataagtttacctcctaaataatactctccccatcttttcttattgacttagcaagtcttttcacgaatctatcttcaagtgattcatcactgtttctttcgtatctttcaacacactttatatattctgaaggatatgatataagcgctttcattaagtttttactctcactttttatattctctgcttcaatatatttatctattaagagctcaaaattcaaatccaaactattgctctttagctttccaataaatttcacaccatctatttcaaccatattaaaagctatatcactataatcagctaaaaaaatattaccattcttccataggttttcaaagtaacaatttccaaggcaaatatcattatttctcatacttctttttattatttccatatattcatcatcattaatgtgcccaagacatttttcacatcgttcaataacactttcgcaagtatttaaaaagtattcctcaaacatagttaaattgctactcttctttttcatatcagcatacttttttaatttctttgcatgtattttatattgcccaacaagttttccaattttattctttatagtttttacatccaatccattatatcctctagctattctgtggaagtctgctataatttgaatctgctctatggcctttttttcatctatatccttcttatctatgtgattaacgatattactcagccttataccattttcttcaatgtaatctataaatgaaatgtcatctaggctccccacaatatcacctctaattacaaatatttaaatttcataaaatcctctaaaaattcttgtctttcatctttatctttgtaaattttgtttaatctactcataaaaaactcttctgtccagggctgcttttccacataatattgaagtccaacctgccaatatccttgaggaaattccataaaagacgccattataggtatatcattattttctatcttatagtcctcattataggtatttaaaataaataagcagcacttcatatcccataagccatttttcattttacgtataagaatacttgataagtcatgaagatgtgtatccagcatacagtaatcaaaatctataatatgggcttttccttccttatctattaatatattatgatgagcataatcatggtgacaaaacccctttaacctaaactcttcattcattttgttaacatattctgagttttctatatcctgtattgatttatctgctttagaaagctcctcctccattaacttcatatacaaattatcaaattctgttttcttctccttatcacaaattatttttttaaattttaatatttcgtcctttcttctcttaaaattttctctccaattaaaccagccaactcttgggttcatgttatccgtaacttcaaaacttctgctctttaaatgaagacttgaaagtgcttttactgcagtataaagatctataggattatcaaaattgcatactctagcatccaaccattcagtaaggtatacataacaacttctgaactttataaacttctcaccactactagtaggaattatttcagggattttatcaaaaccattttcttttaaatgctccatagcctttacaataaagagaacatgaccataatcataatgtatgcattttagacagtaattttttgaactgctattaactctatagacgttttttattttttgggaggcttcagcgttaatattatagttattttttaaaaattcattaatttctacactattcacagtatttcaccacttaacctaatctcacacatttattatatgagaatttactaaactgtgtgatataggctttaatacctcagtccatctaaaatgcaataattttatcacacatttaacacttaactctatactatattataggtataaagcataatgggagatgtgcaaatgaacatagcaattgatgctaggggaataaatttatataggggtactggaattggaacatatactgaaaatttagtaagagaattattaaatatagatgaggaaaattcgtacaccttgtactggtatggaaataactacaaggattttataaaaagcaatactaaaataaacatagtttcaaaaggatgtcatagttttttcgaaaaatgctacttcccagaaaatataataaaaaacagtatagaaatatatcatgttccccaaaacggaataggtctggatcaaaatgtatcatgcataaaagtttctacagttcatgacttaattccatatataatgcccgaaacggttggaaaaggctacttgctaaaattcttaaaaaatatgccttttataatagaaaactctgatgctattttaaccgtatctgaatactctaaaaaagatatactcaaatactttccaataaatgaagataaaatatatgtaactccacttgcggcaaattataactataaacccctaagcagggaacactgcaaaaaatttattgaaaaaaattatagcattagtgatccttttgtcctatatcttggaggatttagtaaaagaaaaaatgtaagaaatcttattctagcttttgctgatgcaagtaaaaagttgagtaaaaaacataatctagtaataataggtctgtgtagagatgaacttgagagtttaaaagacttatgtagacatctaaatatatctaatgaagttatctttacaggatacattggagaaagatttttacctgtattctataatgcttgtgaattatttgtgtatccttctctgtatgaaggttttggcctgccggtacttgaagcaatgagctgcaaaacacctgttgtaacttcaaatatatcttcaataccagaaatagctggagattctgctgtacttataaatcctcttgatacttcagaacttagagatgcaatattaaatattcttgaagatagtaaattaaaacaaaagttaagcatagaaggttttaatcgctccagaaaattttcatggaaaaacacctcgaaaaagaccttagaagcctatagtaatatttataacacctttgcataatcaaaaaataaaaatatgcctaacaaaaatgaatttaatttctgttgggcatattttttcccctaaattctcattataccatttataccattaaaatagagcaaataataaattaactttcttgagtaaattatagcataatattatttcaaagtaaacgtttaaataaaaacaaaaaataaataagtgctattttatgcacttatttaaaaatcaactcttatttattatatctatctgccaaagttttctgcatatttgttataatctcatcaatgcctttattttgtgctgcttcactacctatttcctttactatataattctttatatcagaataatccttataatatttaacatctgaaaacattttagcagcgttcatatacatttcatatacatcacatccgcccatataatcattcttctcatgcattttatcataactatacgctgatgagttactggaacataaagcatatattgagaattgattatatgcagctttttcattacttgtaacaaatttagcaaactgctctgagtatgttttatttttctcattatctgttactaaaagattcatgccatccttatacgcagtattatttcccccctgttcaaaagctggcagcctttcaagtgaaactttcccttttaaattcgggtaatttttctccagatataaaatttcttctggagttgacatcattgatacaatttctcctgaagcaaatgctttagttatatccttcccaggttgaatacttatatttgtatttcctttaattatatcaaaaacaaaactagcggcttctttaaatttattatcttctatatttatcttatcattgttatctaagaaattaactcctaattcactattttgaacatcataaatatcacttaaatcagaaagataaattaaattttttccattttgtttaaccttgtttcctaaatcattatagtccttccaggtttttatatcatccgtatttatatttaaactatgcattatatcagacctataaaacataaatactggttgagtataccatggataaccgtaaactctgctattctttgttaaattatgaatcttatttgataaaaacatatcattttttatgtcgctatcagaagataaatttacaagcttaccactaaacttattgacgaatttagatgcacttaaatcaccaatctctacaacatccggaagcttcaaattgtccttagtattattttcgtagttttttattatatcgtcttcactcataaatactgtattaacagttatgtaatcatattttttgttaaaagcattaatttgatcctttattatgttttggtctttattatttatccatatagttatgctactcttcttttggtttacctttttatcatgcttaactggtgaagtattatttaatgtattagtacaagctgatacataaaaaaccatactagaacacataactgcaacaaaaatcttcttaagaaatctcttcatatttattcccttctaaatttatgttttttaaacactataactatacttttactcaaattatataataacattttattcttaagcagtctataaacaaaagttatatattgtattaactcctacctttaccataaaatatcttatgttaaatatgatttttaaattatatcatatttattcaaaaaaactttttctcttgtaaatacttttaatttgtgttattttaacttgtgtaccggggagtatctatatttatagaacttcacctatagtttttttattacatattgtacacaaactcgcccatatcgagagagtgggactgaaatttttatgccctttgatagaaaaacaaaggtgttacgatactcgccctttagtgaagactattatagaatttctagttaaaagcttaattagaaattttctgtaacaaatagctttaaggaggattattaatgaaaaataccactgaaacatttaaaaattctaaatttaaaaaagagaagctcgttatgttaacagcctatgattactcaactgcaaagataattgattcctgcgacatcaatggaattctcgttggagattctcttggcatggtatgtctcggatacgaaaataccttaagtgtaacaatggaagacatgattcatcatacaaaagctgtagtacgtggtgcaaaaagcacccttattgtagctgacttaccttttatgtcatatcaaacttcagtttacgatgctgtttttaacgccggtaggcttgtcaaagaagctggtgctactgccattaaacttgagggcggtgctttagtctgcgatagaataaaagcaatcgtggatgctcaaattcctgtaatgggccatattggtcttactccccaatctgtaaatgcctttggcggttttaaaattcagggaaaaaatatctctaaagcaaaagaactaattgaagatgctaaaaagatagaagcagctggagcctttgctattactttagagggtattcctgagaaacttgctaaaattataactgaaagcattacaataccaactataggaattggtgctggtaaacattgtgatggtcaaatacttgtttatcaagatatgcttggaatgttttctgatttggcgcctaaatttgttaaaagatatggtaatataggtgacgacatgaaagaagcttttaatagttatgcaaaagaagtacgagaaggcacatttcctgacgaagctcactcatttaagattgatcagagcattatagacgaaattaccaaataagaagggaagtaagatattatggaaattttgcattccattagtgatgttaaaaagtatataaagcaatggaaaaaagaaggactgactataggactagttccaactatgggttacctacatgatggacacaaaagtctaattgaaagagcctcaaaagaaaacgataaagttatagtaagtgactttgtaaatccaatacaatttggacctaatgaagaccttgacgtttatcctagagatttagatagagacgctgaggtttgcactaaagccggagcttcaattttatttaatccagagccttcagaaatgtactttgatgatgcggttacatttgtaaattcttctaagattacagacatactttgcggagctagacgccccggacactttcgaggagtttgtaccgtagttacaaaattgtttaacataacctgtcctgatagagcttattttggtgaaaaagacgctcaacaagtagctgtaattaaaaggatggttagggacttaaattttgatattgaaatagtagcatgtcctataattcgtgaagaagatggtcttgcaaaaagttctagaaattcttatctttcttctgaagagagaaaagctgcaactattctctctaagagcttaaaccttgcaaaagaacttctcgataacggagagaaaaatgtatataacataaaaaaagctataattattgaaataggaaaagaacctcttgcaaaaatagattacgttgaagttgtagatagtctttcccttaagtctgtttctaaagtacagcaatcgattcttgttgcaattgctgtttatataggaaaaatacgccttatagataatttcacttggaatatataaataaacttttggaggaataaaatgcatttaaatatgttaaaatctaaaattcatagagcaacagttgttcaagctgatttaaattatgttggaagcataactattgatagaaaccttatggataaagccaatatacttgaatacgaaaaggtagagatagcaaatataaataatggtgctagatttgaaacctacgtaatagctggagaagctggaagtggaataatatgccttaatggagccgctgcaagatgtgcccaagctggcgataaagtaataattatgtgctattgcagcttaacacctgaagaagcatcagaacatagaccaaaagtcgtatttgtaaatgatgacaatagtatatctaatgttacagagtacgaaaagcacgggacaattggctaaactatataaataaaatgagttacagaaatttgtaactcattttatttattctccaaagatacttcttatccactcaacacttaaattaaaccaggacgctaagtgaggattaatatttccgcccccatctgtttccttagttccaagtgccatgccatgtttcccctctggataaatatgcatttcgaaagaaacttcaactttactaagagcttctgtaaacaacatagaattttgaactggaacaaccttatcgttaaaggtatgccatataaaagtcgtaggtgttttacctgttacatgcttttcaattgatacttcatcaagcaatttcttgccttcatcccctaataaacacttgaatgattttttatgtgcaaattttcctgaggttattacaggatagcacaatataagggcatttggtttcaagaattctttacttatcccatctacattaaatagttcttctttaaaccaatttaccccaagcaaacctgctagatgacctcctgctgaaaaaccacaaactgctattttatccttatctatattccactcatcagcattttctcttattatagaaatagctcttgcggcatctaataatggctgtggatatctattaggagcaacactataatgaagtacaaacgtgctaaagccagctgcattataatttactgctataggttctgcctctctagaagatgtatgattataccctcctcccggcaaaattaaaattgcagatctttttttatctccatttaaaatgtaagtctccatcttaggtctaaaatcactattatcactgcttttataagaaaatccttcccatatatcaataatcctatttatcataatagactccccttaaagctaaaattaatagcttatttcatctaaaatttcacgctcaaccttatttacatcaggaacatagctttttataaatttaacttttccctttactgtgtattcaccaagagctgctggaattagaatactctctccaaagcttattttttcttttccacctttatatattatttctccttcaccatcaacacacgtaaatatataaaatctctctttatcacttttttcagttaccttttctaatacatcataaacctcaagggaaaaatctcttccaaggcaaaaatatgttttttcatatccttcttttgtaactcttattcctttatttttcttacccttaagatttaaatttataacatcaagagccttttctacatgaagctcccttcctctattgtagtcatataccctgtaggtagtatcactattttgctgaatttcagcaattgtaactcctccacatatagcatgaatcataccacttcttacaaggcaaacatcaccctttttaacaggtattctattcatatatttatctaaacttcctgactctattgcctctttaagcgattccttagtacaatttcctgacgttcctactactagagctgcttcttcttttgcatcaactacataccaaacttctgttttacccatatcattttctactttctttgcatactcatcatttggatgcacttgaacagaaagatctgattttgcatttataagcttaataagtaaaggaaaccattccttagaaagcttagttcccattatttcagtacttttttcttttattaattcatcaagtttcttccctttgaattctccattacaaattacactagttccatttttatgacacgctacatcccagctctctcctatatttccatcaggtaaatcatttctgaatttttctaaatctcttccaccccaaattttttcatagtataagtgttcaaattttaatggatacatatatactcgctgcataaacatttagtataagttataatgttataatgtttaatgttaaagcagctcaacctccttttttggttaaaataattgattattgctactagtttttattttaacacaaaatattaaaaagtttaaatataatatggttattttatgtaacttataaactttattacttatagtttttttcacttacattctttgttttaaactcaaacagctttccttcggttttctctatttcataaataggacattttatattttctacaactattctttttaatttttccttattctcttcactacaattaagtcctaaatatattccttctggctttataggacaaactattccctcatttttatcctcgtaggccttaagaattattctccattccttctcataactccagcttacatgttttatttgcataagaaaaaaaagtaagtacattctttcctctgcctcttccttaaatatcctctctaaaaactttgttatatcatacttttcagtttcatatcttataggaaaaatatactttgaaaattcactcatataattaagcttagaaaaatcgtattctatacaaatacccgtatgattattagcgtaatgcgcccacatcggcatactattaagctcttctgaaaaacaacatacttttatgtttctttttaagccatcgatgtattcatctatactttttttgttggtgtaattacaaagtactttcttatcaaaaaaaacaccacatgaatcaaagggatcatttaatttatcaggattcgcaaaccaaatcttattgtttttaagagctagtaatcttttttcatcaataacttcatacttatatagtctccttggaaaatgatcaaattttaatttgtaagcttcttctttttctccatagaaaagcagctcaataaatctatctatccattccattttgttttctccttaaaactctgtatatatttattcttaccaatctttctttatattatataatgaaaaaagaattcaagtgttttattgaatacttgaattctttttagctatttcttattaagctttcctataatttttttaattacagcaggatttttcattgcagaggacataaccgctgcaccatttgcacctgaatttattaattcttgaacattttcttcactaatacccccaatggcaatttcaggtatagtgatatttttagatatagaatttacaaattcaagccctctaccttttaatcccggtttacaagctgtttcgtatatattgccagcaagtacataatccgctccgttttcttcagctcttttagcttcctctaaactatgaatggacactccattttttataatcttacttccaccattatttataaaattaacaaaacttgaatgatatgcatatgcttttacttcttcagccactcttaagcttccatttacaatcaatttagcactatgcttatcagtaataaattttatttttttagctatttcatacaactcgtcataacctaaatccttttctctaagaattacactgcaagcaccatacttaagcaccttttcgacacaaccaagtagatctttatttttagctaattttctattagtaactacataaatcatagagcattttcaaaatccttaaacacaggattatatcctaactcctttattctattataaacttcacttacactcctcttgtcatttgtatcaaactgtccttcgcctttatccttgcagccatggcctccaacctctgtggacactcctgctgacatttttgtaactccaataggtataagtttatctctaaactcttttggctctcttgtggttatatttgtacctgctcttggaagaaacattttatatgctagaataacctgtacaatatttttgtcattaacttcatatatatcatcaaagcttccagcatgaggtcttattctcggtgcagacattgatatttcaacacttgggaacttttcttgaatatatgaagcatgaagacctgtaaaaaatgcctcacttctccatttgtaaagtcctaaaagtgctccagttcctattgagtggattccagcctcgcaaaccctttcaggcgcatcaagtctaaacttaaaatttcttttaggtccgcttaaatgaactttggaatacttttcttcattatatgtctcttgataaatagttaagctatccgcacctgcttctactaactctctatattcattaacctcaagaggatatatttcaatacatatggaactaaaatatttttttaaaagttttattgcatcctttatatatgaaactggagtttgaacttttgattctcctgtaagaagtattatatttctcatacctgaactatatatcgcccttgcttcctcttctatttcctccattgtgagctgttttctctttattttattttttacattatatccacaataagcacatccatttacacaataattagcaatatatataggtgtataaagcaccactgtttttccaaaattcttaagcgaaagttctctagctttttgtgccatatgttctaaatacttttctgcagctggagataaaagctttaaaaagtccatctcatggagaatatccttacataaaatcttctctatatccctagcagttacctttgaaaaaaaatcatcaaagtcaaaatctttatattgttgcaattttttataaaaactcatttacctacacttcctatcttaaaaatcctgtaagaggagaagatgctgatgcgtattctttttcctctcctatttttgcaacataggccattcttcctgctttaactgccaaagagaatgcttctgccattaatactggattatctgctgttgctatagccgtatttacaagtaccgcatctgctcccatctccatagccatagcagcatctgatggttttcctattcccgcatctacaactacaggaacttcatttatttcttctattaatattttaagcatttccttagttctaagtcctctattacttccaattggtgctcccagtggcataactgctgctgctccgacatttacaagtcttcttgcatccataaggtcaggatttacatatggaagtactataaaaccttcctttaccaaagcctctgttgcctttatcgtttcataattatctggaagtaaatatttattatccgatataacctctatcttaatccagtttccacaacctgctgccttagctattcttgcaagtctaatagcctcctctgcatttctagctcctgatgtatttggtaaaagtattaaatccttatctataaaattcaaaatattatcctgctttgaagttatgtcaactcttctaagtgctactgttataacctttgaatttgatttttccatgatttttggtataacttcattagaggccaatttacctgtcccaacaaaaagtctactatctagtttaactccacctatttctaattcatccacttaaattcctcccaaaactttattcattttccatgattattctaagtacttggtttgcctcatggttagccgctatattaactcttggagccataagaccacagccaggtgctgcttcattttctccatcgcccacaatataaaaatttttatttatcttctttgttacaatgctgttactcgaaaaataccctgccattccggatgctccgattacctttttaccattcatttttgtaagaacgctatttataagttctgccttacatacaggattatcaaaagcctcaacaattatatccacatctttaaaaatttcttgtgcattgttcccatttataaatgtgtctactacgtctaccttcacaaatggattacattgacttattatttctttaagtgcttcagtttttttcatacctatatgtcttataaaataatgctgacgatttaaattgcttggttcaactacatcaaagtccacaagtacaagtcttccaactcctattcttgcaaggcttaccgctgcatttgaaccaagtcctccaagaccagctatcccaacagatgtatttttcactttttcatgaacctttggagtatgcctcgaaactagctgtgcttccatatcttcttttttaggaatttcaccctttttaataaaaacaacgttatcttcttcttttaaacttaaatcttttttcataataaaaccgttataaacaacaacatctgaatctttttttatctgccgttttagctgcataagtgtagttccatttttcacatctaatgatctttcatttacatataccttcatttaaccaccaccaacaaatctaactacttcaaccttagactcacttgaaagttttttttgtttatactcatctttatttatgatttctaagtccacttcaacaactacctgactactttctatattcattttatctaaaagttcataaacagttatctcatcatcaaaattcatatcttttccatttactaacactaaatcacctcttttggagaaataaaaaagagaagcaaatcgcttccctcataactttctttcacattaaaacatataaacttctgcgcagaattatatgtaacaaacatgatgcattaactccctacgttggcattatccaaatcaggttatgagggtctggaatcacattccactctcagcctgtctacaggctccccgttaactatatttaatttttacatttttaatttagcacaataaaacacaaaatgcaaattttatttttaagcgtttaatgtaaatattgtatttatgagcttttaattgcatatttatataattcctggttataattcataatgcttacaccttaaaatttatgtttaaaaatttaagaataatatttttaagaaggattttttaatgatataatattgtataaatatttacattaggagtctttatggaaaaacatgatagaataaatctaattttaaatcacaaaaatttcaaaacatacttgctaaaaaatatggagtatgaaaatggcagaaagttttgtcttcacaatttagaacactttcttgatgttgcaagaattgcatatataatggttctagaaaaaaatcttgctataaaaaaagacataatctatgcttctgctcttctccatgatataggacgatggcagcaatatgaaagtggaatttctcattctaaagcaagttcaattttagcagctaatatcctaaaagactgtgaattcaacgattctgaaagcacccttataattgaagcaataaaaagtcatggagaagcaaacactctctcggatttaagcgccatattatataaaagcgataagctttctaggaattgctttaattgctctgcttataaagaatgtaattggagttacaataaaaaaaattcaagcataatatattaaggagtaaaaaatgaaaatagcgaataaagattttatacttggagaaagaacttacataatgggaattttaaatgttacacctgattctttttctgatggaggaaaatttaataatttagacaatgctttaaaacatgcagctaagctcatagaagatggcgctgatataattgatatcggtggtgaatccacaagaccaaaccactcttctgttgacaaaaatgaggaactagaacgggttattccaataatagaagccgtatcgcacgaatttgatattccaatttctatagatacctataagggcgaagttgcagaggccgcattagaatctggtgcgcaccttataaatgatgtatggggtttcaaaaaagatacatatatggctaaggtagctgcgaaatatgatgttccttgttgtctaatgcataatagagaaaataacgattatagtaactttcttcaagatgttatagatgatttaaaagaaagtatagatatagcaataaatgctggtgttaaaccagaaaatataatgatagatcctggaataggttttgcaaaagacttcaatcaaaatttgcttttaatgaataatttagaaaaattaaatgttttaaatttccctattcttttgggcacttctagaaaatcaatgataggcaatattttaaatttgcctcccaacaaaagagttgagggtacagttgctacttcagtcataggtgtagtcaaaggctgtgattttattagagttcatgacgttcttgaaaataaacgagcttgtatggtagctgatgcaataataaggagatgattatattggacaaaataactatagaagatcttgaaatatttgcgaaccacggtgttctaggagaagaaaaagtattaggacaaaaattcttattatctctataccttactttagatttaagaaaacctggattgtcaaaaactttgagcgatacagtaaattacgctgaactctctgatagagtagaagaagaatttcagagggaaaatttcgatttaattgaaactgctgctgaaaaagtagccgagtttattttactaaattacgatttaattcaatctgtaaaagtaattttaaaaaaaccttgggctcctgtaaaaaaacatttaaagtatgtttctgtagaaatagaacgaagttggcatacagtttatataggccttggatcaaatattgcagataaatcacaaaatttaaaagatgctcttaaaattatcgatgacaactatttatgcaaaatcacaaaaacttctaacttctatactacaagacctgttggatatctaaaccaagataattttttaaactgcgctgctgaagtaaaaactttaatgacaccaaatgagcttatggactttttccttgaaacagagaagtcgcttaaacgcgaacgaaaaatacattggggtcctcgaaccatagatattgatattttactttacgatgatttagttacctatgatcctcactgcacaatcccccatcctagaatggcagaaagactttttgtcataactccattatgtgatataaacccatacttggttcatcctatatccaataagagattaattaatataaagaatgtcttatcaaaaacacaatctctataaattcaaaaagtaaatcttatggaacttaataccttaagatttactttttctcatgtatgtactataatgaaataaaaaatatatgtgctaggggtgcctttaggctgagaaacagtttgtcacgttaacccttaacctgatctggataataccagcgtagggaagcagtttgaattttgaattacttgctgtaatttgcagttgatctgttttctactgttgattacagctttttattttttgtttaccttaaatccacatataatttaggaggttttgttatggacaatttttcattctctaaaagtattaagacgatatcacaaagtccatccgctatagctactcttgtaggtgttttaatattaatagctgttttactaaaggtaaaaaaaataaaattcactacaaaattagtagctcaagttggagttgttttggcactttcaactgttctaagtttatttaaaatatacaaattaccacaaggaggaagtgttactttaggaagcatggttcctatactactaattgccttcttttatggtcctgaagtaggatttttaaccggctttctatttggaataatagatcttatgctagaaccatatctacttcatccgattcaggtacttttcgattatcctctaccatatatggctttaggctttgctggctattttaaaaataaaaaacttttaggaactgttactgctgtttttataagatttttattccatgttatatcaggtgttgttttctttgctagcagtgctcctaaaggacaatctcctcttatatattctatagtatataatggttcctttttatccattgattgcataatttgtcttgtgataatagcaataattccattgaaacgtctatacaccatatctacctcaaataattaaaacataattaaaagggacagttaatagtgaatctgtcccctttgatttttactatggctgtctaaacttaaccatcaatattccaaatgcaatttttaatattccatctataattcctatgtaataaaaacttatttctatatgcatcattccatatatagcattgacacctactaaaaatgctaatactaaaagaagttttccatgaactactgaaaaaggtacaaagtgaatagcagttgctaaaaaagctgcaagccatatcattctaaaattttgttctccaaagtatcttcctccaataattcctgcagtcacaaacattactattatagatatgtttgccattttactttgaaagcttgaattttttccgtaagataaatatttttttataaattctgttctaaatataataatcattcctaaagcatatcctatagaaaatataccaggattcacacaattttctcctccaaacatagttcctaatattattataatacctatccaaataagccatactccgcagggtcccttatttaaaaattttatctcttcattttccttatatcctaatttattaagtatcatttccataatgttttcccccttcatttaacttcaacctatggtttcattatacagagtatttcattatggtgccattgaactaagtcatgagtctagttttgtagacattacttttgtcaccctattcatttattgttcttctaaattgcgccgctcctattacaaagaaaactaatgcaaaaagaattaaaactgcaatgtgaggtaaaatactgtgcactccaacgttttcaagagaaattttattcagtgcttctactgcccatttttgaggagtaaagtatgctatcttcttcattacacttggaagattaggtatactatctaacggtataaaacttcctcccactgcagaagtcaaagttactgtaagtgacactacagatgatatatgagtttctctttttgcccaccttacaacaacaagtcctgcacttaatacaaccaagttaagtaccgcgaaaattagcattacagccataatggattttccaaaatatacgtgaagaaaattttttgttacaaatacaagtatggaagattgtataaataaaagtccaaacatggcaagtaatattgacatcaatattgacgaatttttattaggtgtagacatactccttttaagtatttttttccttttaagttcatatatatctgtaactatataaatcattgaatacatcagaaaatttatgattagatttgtggataatatcccagaaagcggtcttgtactttcattgtttagataccttgaagttacctctacatacgtgtttttcatgttatctttaatttctctattaaatttattttggtttaccttaattccaaacgctcttgtttcactgaaagctttacttaaaaccatttgtttcccgatatatgaattaaattgattaagaacagcagtatcaacgttactgtttaaagcctttacaatattaattgatggcttttccccacttttaatattctgtgtgaaattcttaggtataactacgcaaattgatgctgcatttctctttatttccacttcaccctctttataagaaacttcatgtatagaaaaattacttttgtctaatatttttaataatttctttccttcttttcctgtatcattatttacaactgcaatatttattgttgtatttgaactcactccgttagaaaaaaaagctaccaagctaacaactatagttggaaataaaattgttataataaatcctcttttattctgaactaaaattctctttagatgtaaaaatgccatatatatcatattagattcctccatagcacttgctttttctaatagcaactactgttcctataaccattccaagtagcccaactaagaacattatacttaagttcacaaacacacttttgatactataaccaagtgctatcttattataagcatctgtaatccaataatttagagtgagcttcatatacttaaattttactgctgcttcatctacataataaaatgctcctccaaaagctgaataaagcattataaacggcatacaaatagtattcatagttttagttttcttaaatatactcataagaagtgatgctaatcctgtcattgcaaaagcctgaaataaaattgttataaaaacttcaaatcctttacctccaaaattatttccaagcataaaccttatacctacataaacacatataaagactatagtaataacaaaacaaaatactattttctcaatgaatagttgaaaataatttacagtagtagacatcattctactcatagtacccgttttaatctcctgcgtcattatacttgccgtaactaatgttataaaaaatcccgtaaatgcaagcattgcacttgcgtaatactgtcttgcagttatctttttttcaagctcaaaattagttgtcgttgaatagttgtctgtacttaatttagcaactctaaccaataatctaggcattacttcttctaatcttttcttatcattggtattttcttttaaggtttttgccactgcactgttattatttaaaacatctaagtaggaatttataatctcgtacaccacttcagttttttctcccgctattggtgattttatcatttctatgttagtttttttgttttcatcaattctatctgaaaagttctctggaattattattgcagcgcttacacttccatcctcaattttagcttgtatacttttaaagttgtctatatattttacatctataaaacttttaactcttgaatttttaaaaaccatctctaatttctttgcataaattcccttatccttatttaagataacaactttgatcttgggtaactttacttctggatttacctgattcttatatatagctccatataaaatagataaagctataggaaaaattaaaagtgtaaatatgtatagttttatgcctgataaaaacttctttaaatccttaataaatagtgctttaaataccataatcaatccccctaatctcttaacctcttacctgttaagctcaaaaacacatcttcaagactaggagaattcacctttatattttttatcttaacttccattttgattaattcttcaattacagcatttaagctatcacctgaattctttatgacaatatcaagctcccttgaagaatactttacccttcttacaccttcaatgctttttaatcgtatgtccatttcttcttcatagccttcaacaaatattctagcattttcttcatcattaaccattttctttatgtcttccttttgtccaatagttattattttaccttcatccattattgcaagcttatcacataaatgttctgcttcctccatataatgagtagtgtaaataatagtagttttaaactttttatttaactcctttgtatactcaagtatatgatttcttgattgaggatctattcccaccgtaggttcatccattattattagcctcggatgatgcattacagctgccgctatattcaaccttcttttcataccacctgaataatttttaaccttatcccttattttatcttgaagtccagatgcctctattacttcttttattctatctttaagaagtgctcctttaagtttgtacatacttccccaaaactttaaattatccatgccagaaagctcctcataaagacatatatcctgtggaacaagtccaatacaagcttttgcttttatcttttctttatctatatcatttccatctatacttatagttcctttatccttttttattagcccacaaatcattgatataagagttgattttccagccccattgggccctaaaagtccaaatatttctccctcttctatacttagagttacattatcaattgctaatttatcattatatcttttagttacatcgtttatttctaaaatatccatgacccatatctctcctttattttataaattcattatacagggatttatgtttaatcaccattgaattaggtaatgaattttatagaaaaagcattacttttgtcatggatataaaattaaacttctacaaattctatatttatttaataaaacttaccttaagctcatttctatctacaagtcttttatatttgtacttaggataccccaccattacagctcctgttattaccatattttcttgaagtttaaacaaatcaataagaggctcataattatcaaaagcacacatttcaaataatccagcaaaacagcttcctaaacctagtgctgtagcaaaaagctccatatacgaaaatgagaaaattgtattctctcttccatttttaaattccttaggtgcaactcctaaaataagcgttggcgcatctcttagtattttatcaattcctttttctctatagtccttaacttgtttaggaaaactccagtgtgaagggttatctatttgtgcctccatccaatctattacaaactccgttgcttttttaagtattttcttatccttcacaacaatatatgatatattctggctattactggctgatggggcaaaatgcgcaatattaactagcttaactaatttatcatcttctacaggcacgtttttatagcacctaattgatcttcttgatcttaaaaataactcagccagtttttcatctattactggaaattcctttaattcttcttgttttgaaatagaagtttttacattatcaatagctccactaggacatactgctacacattgtccacattctatacaatttgttcctttaagttctttaggtccatcttcttccatacctaaaactattgatggacataccgctgcacaaattccacacttcttgcactttagcctatctactttaattaactccatataattcatcctttcttgtataaccaaattacttacgctataataataggcattaatgcaatatttaacaagtacgcactttaaagtagtatagttaccacttacatactacagaaaattttcttttggaggataatacaatgattaaatataatgacacagaatatcaatgttccatggagcttaccttagacattataggtggaaaatggaaggttctaattctttggcacttaggtaaaggaaccttaagatttggagagctaatgaaaactcttcctaaaataactcaaaaaatgttaactcaacagctcagatccttagaagaaacaggattaataaatagatttgtatatgcttccgtgccacctaaagtagagtactctcttactgatacaggaaaaagccttcttcctatcctagaaaaccttcgtcaatgggctcttgattacatagaaaaaaataaggctatactttaatataatgtttaaatatagcctataaaaattgaacatgttctcttaatttatataaatttcacaattaattaaaacagtctgtaattgattttcacacttactttttcaattacagactgttttgctttctaattatttgattacaactcctttatgtaccaaacatcacatgcgtagtgatctgtttcaattaaaggcttttctaatttcttaaatccatttttaacatagaatttattagccgcagtcatattagaaaaggtttcaagatagcatttgtcatagtatttttttgcaaaatccaaagctagacctagcaaatcttttgcaattccagttccccttgcttccttgtatgaatacatcttttgaagttcacatacattctcagccccatttagaggtcctatgccacagcccgctattatcttaccttcttcctcaacaacccaatacttagattttttatcttgatatatctcataaaaacggcccaaatcaggatctgtccatgcgcaacccggcttatcagcaccaaactctattaaacaagtccttataagtgtttcaacctgctcattatccttcttctctatctctcttattaacatagcatgtcctcctatcgttgtatatttctactacctttgatttaattttattttaaacacatataatttgataccccacgatttcccttcataaattatatatcaaaacaatattattgtgtagcttagttttctttactttcacataatactaaaatctcaataacttattaatacaaaactttcctaaaaaaataaattcttaataatctttttctctgtaagttcttgaaatccactccttaccaagtagattaaatatgtcttcctgctctatttgaagattatgccctgccatatcaagtactgcaaaggtcgctctaggatagttatctagtatattccatgcatccttgtatccaacactagcatcttgctttcctagcaacattagtgtaggcttatcaaatttttgtggaagcttatccacatcaaaagaaaatccatacccctccctctgtaatctctctaaaaaatcttgatttcctagtttaattccagacattacctcttccttaaatctaaggtaaatcttctcattttgcactactgacattgaactaaactcctctgcctcctctttattgagtttagacattaatttctcatcataagctaaaataacatgttcaggtactgtcctcttattaaagtccggtattatagcaggacaaataagaaaaagaccattaaccttttctctaatcttataaactactcctcttgataaatatcctccataagattctcctacaagtaaaaaattttctccctttgtaaccttcattatgaattccagtattatatcaagcatattatcagaagttttaattgaatccgaactagttgacttgcccatgccaggaagatccacatatattcttttatatctactctcatctgaaaataggttttccatacatccaaacattattgtatgatccacagaatagccgtgtaatataataatgggctctccttctcctataatattataatttaagactacatcctttatattaagtttcatattccctctccttaatatcactttgttattattcaaagcttattatagcatataatacaaaatatttttttgtatcatataaatttaaaaatattctgtagatattattaataaaaagtcaattttacttaatttctgtaatatattaaaattaaaatcattaagttatttttatataaggagtgtatgttatgaaagttgcagtaattggcgctggtgctatgggcggactttatggcgcttatttatcacgtaaaaatgatgtctatatgattgatattaatgaaaaagtagttaaatcaataaatgaaaatggtttaattatatatgagagagaaaataataaaaaagaaaaattcttagtatctgcctttacagattcttcaaacttaggtcctatggatttagttattatatttgtaaaaaacctttacacaacatctgccttaaagaataatctaaacttattcagcgattccacactagtaattacacttcaaaatggtgctggaaacgatagagatttagaaaagtttataaaaaaagaaaatatacttattggaacaacagaacacagctgttcaattttagagacaggagaagtctctcacaaccaagaaggaattacaaatataggcatgcttgtttacaatgataatataataaaacgtatatcagatgagtttaaagcttgctccttaaagaccgaggtttaccaaaacattcaggaaattatttggagcaaattatttattaatatggctctaaattctacaacagcaattttaaattgtaaggttggatatcttgagaaaagtaaagatgcaagcgaaattgtacagagcatactatctgaagctgttgatgttgctattgctgacgggactttctttaataaaaaagaggtaattgataaagttcaaaaatgtattcgtgaggatcttcctaacgcaattacttctatgaatcaagatgtttctaataaaaggttaactgaaatcgatcatataaatggtgcagtggcaaatttagcaaagctttataaaataccaactccatataatgattgtattatccacattatccatgcactagaaggcttatataatatataattcatatataaaaggtgatgctttataaacattgcatcaccttattattctaatttccagataattgtttcaagtaatccgtatagcttactattgaaactgatccatctattcctctattctttccaattgtaaatatgttactcttagcaattccaatattagaatatgcctctacatctgttttttcatttccaaaaccataatcaaactctataccttggcttttgagctgattcaaataacctgctttaaagctctctgcctcttcaccaagaagtacgtcccctccagtatatgtatgaagtaaccccatagggaatccatttttccaaagccaagtttgactttcctcagataaccaatacggccttgctgttaggtataatattccatatcctttagaagcataatacttaactacattatctacatctggatacattttagccacataatttgaattaaaaaattcacctgcatattgttttacatcttcaaaatcagtagttgtcaatgtaccatccatatcaaaaacaacatatttcttagtattgtccaatacttgaatatacatatttgcagaagttccgtctccttctacataaagtttaatcaagtgcattccatagcttagcttcatattattaggtatattatattttatatgtccattagtgtctgtaactgctcgtcctattttgttccatgatggcgaacttgaatctaaagaatattcgtatattgaaacccactcattagctaatttaactctgacatctccatataaaaaatcaccttcgataacttgaggttgattttttgtatatatctcatcgtagccattatgatgaggatgatgcttagttacaatttctctatttatccaactattaaattcagttgggcttggctttacaaattcatcatctttaaaatcaaaataccttaaggctgaagtatctctatcatttactgataaagcaagtatcttattacctcctacaaaaattaatgatattagagtcaaaaaggttatcaatgtcttagttttaaaaattttactcataacttctctccttttaatggttttttatccgtattttatgatactatacaaataatatcattaaaagttatatattgaaaacattgcgttaattctgttttacaaaagtatattttaaactaattcatttttaagagcaaatattgcaatttgtgtcctatccctcatctcaagctttgataaaatctcagttatatgatttttaacagttccctctgtaacatactgtttttctgctatttctttatttgaaagtccagaacctattgctattattatttctatttgcctatctgtaagcttatacttctcctttatctcattagaagaaggtgatgttttcattactccactaaccattttagaggctatttctggatttacaacaacatttcctttataaacgcttttgactgcatctattatgatttcatatgaagtatcttttaaaatataaccatttgctccatttttcatagcctcaaatatgtattcatcatccttaaaagttgtaagcaccaacacttttatatctgaaaactgatttttaattattttagtagctttaacaccatcacatacaggcattctgatatctgttaatacaacatctaccttttctcttttacaaatttcagcagcttcaattccattctcagctactcctataacatttatttcgtcattagcatttaatattattttcaaaccatcacgtattaatttttcatcatctgcaataacaacatttatattatccaaaacctttactcctttagctttaataatttataatagaatttttttcttctgatgatttaggtaaattcacagtcacttcaaaacctttatccctttcactgtaaaactcaatatttcctccaagcttctttactctttcctccataccagtcataccaaagcccttttttattccatccgttccaactccattatcctttattcttatgtagagtctatcttgattaaattgcatagaaacctcaactaacgacgcttttccatgccttattgcattatttaaggcctcctgaacaactctatagcttataaaactttcatctgaagacagtgaccttttctcttttgaaagtataaaccttatatcagcagatgtgagcttcttatattttcttatcatttcctctatagcaaaaactccttcaaatctatcgaaatctgtaggtttaagctctcttacagttcttcttacattttcaattccacctctaacaaagcctgtcatttcctctacagtttttaaactttcctctttatcactttttataagatataaaagagcttgaagctgcattaatactgccgataatgtatgtccaacagaatcatgaatttcccttgatattctatttctttccctaagaatgcttaactcttctaccgtttcagaatatctttcaagcttttcataagctccccttaacttttcttccgattctctgagcctatcataaagtccctgcgcctctatttttcttttttgttcttctctaaagctgtctcctataaaaactaaagtaaatattaaaagtatgctaaagagaatatttattaaattagttcccgcctttaaactaaagggaatttttacattttgaataattattacaactgagcatattataccagaagcatacgcttgagttttagaaagcattatagatgaatctaaaacagatataaaaagaaataggaaactaaaattccttacataactatacataaaacaaactaaaaccaaatctactaccatagaaacactaacatacttcctattccttaaataataaattctaaactgagttacaataatatacataagaaaaaatactataaaataatacatctctgtattttttaattcaccataaaaaacagcacacattcctatgagtaaatatacagcatacctaataatggtcaaaaaataatagcttttgtttttcaaaaaatctcactcctacaagttttctaatgcccagtttacaatgtattcaagtggattgtcatcatttgatggacatatattgctgcacatgcttataagtctattgttgccatttgacacacaaaaaccatatcccgccttttttattagttcgtaatcattcatgttatcacctacagaaataaccttattaatatcaacaccctctagattgcacaaattttctagtgctgctccctttgataaaccctttggaattatttctaaataattttcaccgcttctcaccaaattaacctttccaaaaagcctttcaaagttttcttctaagtaatcctcctgatttttctctcctacaacaagaactttcgtccacttttctttccaaagctcttctggaatttcgtagaatacactgtaacccctttttttaaatctttcagtaaatctgcaagtgttgtaaatataggtattttcattactgtatatttcaattccaaaggaagtatcgtattcctttaccttttttattatttcttttactctatcatctaattctatttcaaatatagtcttacttttattgaaatcatatattttagctccgttgtaaagtatgactggtaaatccacctgaagatttcttatatacctatatgctgattccatagttctcccagtggctatagtaaacctcccacctaaactttgaaacttttttatagcattaagattcttttctgaaattcttttatcactgccaattaaagtatcatccatatcagatattaaaatccatccctcaaatcttttgttcaaatatatcaccctttaaaattttttaactaatttaattataacagctgggaaataaaacaaacagttataattattaaaaaatcaaacctaattataaatactttttataattattttaataaccaattattaactaaataagatgatatataaaatcactattatttaggaaatctattatcatccctttttataaaatttaaattgtagtatcatagattataagctttattaatttataggaggtcactattatggaaaaaatcgcaagttttactgttaaccacttaacacttcaaccaggtgtttatgtttcgagaaaagataaatttggtgatgtagttattactacttttgatatacgaatgacaagtccaaatgaggaaccagttatgaataccgctgaggttcatactatagaacatctaggggcaacttttttaagaaatcacggaacatatgcagaaaaaacagtatactttgggccaatgggatgcagaacaggcttttacttgattttacagggagattatacttcaaatgatattgtacctttattaagggaaatgtataaattcattgcagattttaaaggtgaggttccaggtgctgctgcacgtgattgtggaaattatcttgacatgaacctacctatggcaaactactggggaaagaaattttcagctctcctagataacatatctgaagatagattaaattatccagagtaaatattaaaatcaaggctattggaaattatccaatagcctttttattttgcattaaacgccaaataataactatatttttgattttatatatttttttattgcattttatataataattcaattatttacttttttttcaaaacatgctatgatatatgtcaaaggagggggatataatgaaaaaacttttcacaaatttactattattgtgctcaatagttttccttggagcacttttaaatggacataacgtgcaagctagtgattcatttacatatcctagtgcatatggttggtggtcagtagacaatggctatgacgttaataatgttaacagtagaatggttagtggcgattttaatggcgatggtaaagccgatgttgctaccttctatgactacggtaatggtgcttctagaattcatgtattcacatcaaatggaagttcctttgactatgctagtgcgtatggttggtggaatactccaagcggttatgaccctaagagaattacagctgttgtagctggtgattttaacggtgatcacaaggatgatattgcggttatatataattacggtaattctgaaacaagaattcatgtattcatttctactggaagttcctttagttatactgattgtaacggttggtggaatgctactggttatgatgctggaagaattacaggagctgtagctggtgactttaatggtgatggtaaatcggatattgctactatgtacgattatggcggaggtgaaactagaattcacgtattcacttcaactggaagttcatttacctatactggtgcaaatggctggtggaactctactggttatgattccaacagagttaaaggaagagttgtagctggtgattttaatggtgacggtaaaactgatattgctgctatgtatgattacggtggtagtgaaagtcgcatccatgtatttctttctactggagattcctttaagtacactggggcaaatggttggtggagcactactggatacgatgctaacaaagttactggaaggcttgtagctggtgactttaatggtgatggcaaagctgatattgctgctatgtacgattatggcaacgcagaaactagaatccatgtattaacctctaacggcgactcttttacctacactggagcaaacggttggtggaataccactggttatgatgctaacagagttactggaagggttgtagctggtgactttaatggtgatcacaaagctgacatcgccgctttctatgattatgggagttctgcttctagaattcacgtttttacttcaaacgctgattctcccgaatcttcaaaaggagcagagctagtagcctatgctgaaagcttcttaggcgtaccttatgtatggggtggtgcagatcctagtggatttgactgttccggtttagttcaatactgctacgaacactttggagtagatcttccacgtactacctacgatcaggttaactgtggtactactgtaacagatgatcttcagccaggagatttattattctttggctctgcaacaagtccaactcacgtggctatttatgccggaaatagtaaaatggttgaagcacctcatacaggcgcaaatgtaagacttgtcgatattaggtcctactttatagcaaagagaatatttaactaaaaagaagctgtcctatttcggacagctttttatgaaatcttacttaataatgatatatgcacacaatttcttaaaagaagtgcaataatatatttaaaattcctaatgttatattttataatattatattaatattaacattactttattttttttcaatatatgctataatatgtatgaaagggaggtattattaatgaaaaaaatttttactaatgtattattagtaggctttttagtctttattagtgcaattttatatggacacagtgtacaagctagtgattcttttacttacgctagtgcaaacggttggtggagtactcctagcggttatgatgtcaataatgttggtagtagaatggtaagtggagactttaacggagatggcaaggccgatgttgcaaccttctatgattatggtaatggtgcttctagaattcatgtatttacttctactggaagttcatttgattattcttcaaacggttggtggagtactcctagtggctacactgcaagtagaattgcagctgttgtagctggtgattttaacggtgatggtaaagatgatattgctgccatatacgattatggtggtggtcaaacaagaattcatgtatttatttctaccggaaaatcctttagttataccgattctaatggatggtggagcactcctagtggctacactgcaagtagaattacaggtgctgtagctggcgattttaatggtgatggtaaagatgatattgctactatgtacgattatggcaacagcgaaacaagaattcatgtatttacttctactggaagttcctttaattacagtggtccaagcggttggtggagttccactggttatgattccaacagagttaaaggaagaattgtagctggtgattttaatggtgatggtaaaactgatattgctgctatgtatgattatggtaatacagcttctaggattcatgtattcacttccactggaagttcctttaactacagtggtccaaacggttggtggagtactcctagcggttatgatgctaataaggttacaggtagacttgtagctggcgatttcaatggcgacaaaaaagctgatattgctgctatgtacgattatggtaatacagcttctagaattcatgtattcacttctactgggagctcttttagctatacaaattctaatggttggtggggagtttctagcggatacgacgctaatagagtcacaggtagagttgtagctggtgactttaatggtgatggtagcgctgatattgctgccttttacgattatggcaacacagcttctagaattcatgtatttacttcaaacgctgttcctactcctaataaaggagctcagttagtagcttatgcaagaacctttataggtgtaccttatgtatggggtggtacagatcctagtggattcgattgttcaggcttagttatgtattgttatgcacactttggagtaaatctcccacattatacaggagatcaagttaaatatggaactgttgttacaaaccttcaaccaggagatttattattcttcggttctacatctgatccttatcatgtagctatttattcaggtaatggttatatgatagaggctccaaaaactggtgaaactgttcacgaaacacctattagatcatactctatagcaaagagaatatttaattaaaaagaagctgtcctactctggacagcttctttttatgcaacttaattctatgttttatattatggatttatatattttcctaattacgtacagtcccaacaacatttttcattccaaatagtgaactacactgattatcctcagttttaattctttatttattcacaacattaattggacatccatcaacaaactgctttaaattattcacagctatgttcataagtctttgtcttgcttcactagtcgcccatgcaatatgtggtgttattatgcagttctccgcttttaaaagtggattatcttcttttataggctcaaaggatacaacatcaagcgctgctgcgtaaaccttattctcctttaaagcttcatataaatctctttcatttataagtccacctcttgctgtatttattataattactccattcttcatttttttgatactagctttatttatcatttctttgttatcatcttttagcggacagtgaagagagatcacatctgcctctttaaaaagagtatctaagcttacaaacttcatactttcattttcatatttcttgtctggatgtggagtatacacaaaaaccttcattcctagagcttctgccgctttctgcatagcttttcctatgcttccatatccaacaagacctattgttttacctgaaagctcaattataggatattttaaataagaaaaatcagcacaattctgccaatctcccttctttactgatgcattatgttgcccaacatgtccgcatatttcaagtataagtgccatggacatttggactaccgatgaagtgctatattgtggaatattggttaccactattccttttttctttgcaaactctaagtcaactacattgtaccctgttgcaagaacacctatatatttgagtttgggaagtttttcaattaccttacttgttattatagttttattagtcaaaatagcttcagcatctctagccctttcaattgtcttttcttcttcttttcctgtataatctgttctatcatatacagttaaatctccaatttctttaaaagcttcccaggacatatctccagggtttaaagtatatccatctaaaactactatcttcaattttcttccctccataaaaccttgtcattttttattatttctttattatctctacctgttggaatagttctaataacattaaattctgcaaagttatccgttatattttcaagagtatgaatattattacccatcctaataaccatacctttagttattactcttgatttttctaatccttcttccatccatttcaaaactatttgtcccttggtaactataactgcttcatcaatagttctatgtttatgatactcttgaattgaatgtggaggaattttatttaagtgtatttcgtactcattaaatataaaataatcgacttcagttccattttcttttttaacagatatggcatcatctttcgtatatatttttaaattacacataaacactctccttttttaattttttatagacatgattagaattattccgtacttaaattaaatgtaaaacttttactgtatatgatttattaatgtgttatatcctttcaatagaacaaaacccttgatttttttaatactttcaagggttttatagcactaatgaaatactctaatttttatctttaaacatcgacataagatctgcaaaggcattattaattggtgcttctgcttcctttttcatcttcttcatataatttgaaacttctcttttattaactttattattattacccttaaaccttttttggaaagaagaatacttttctctaaagctgcagtttgggcacacgtatattctgccctctccttctcctctaagttcaagttttttatgacattcaggacatcttacatttgtgaacatagctaaattctctctatgtccgcactctctatcctggcatacaagcattctacccttcttaccattcacctgaagcatatattttccgcactctggacactttgttccagttaaattatcatatttaaaagtgtccttacttccttttacatcatctacaagcttagaagcatatccttttatttcattaacaaaacttactccatttaattttcccttgcttatagcatcaagctgtccttcccattttgccgttaaaagaggtgactttaaatcagaaggtactaaattaactagttgttttccctttgatgtcggaactatttcatttccttttttctctatataaaaagtcttataaagcttttctattatatctgcccttgtagcaacagttccaagcccacctgtctctccaagtgtttttgcagaaattttatccatgctaacatatctttgagggttctccattgctgacaaaagtgttgcttctgtaaatcttgaaggtggtttagtttgcccttttttaatagaaactgtactgaaggttatatcttctcctttattcatttcaggaagcatttgatcttttaattcactcttctcttcaaaatcttcagttttgtcgtaaacttctttccaacctttggattttacaacctttccttttgctataaatatctctccggctacctctgccttcactgtagtttgaatatattcaaaaggaggaagcattatacttaaaaatcttttaacaactaaatcatatattttaaattcttcattgcttaaagccccaagcgctggtctttcttctgttggaattatagcatagtgatccgttaccttagaatcatccacaaagcctttgtgaacatttattttacttcttaatatttctgctgcaaattttgaatactttcctatggaaatagctctcaatctatctggaagagttgctacaacatcatgaggaatatatcttgaatccgttcttggataagttaaaagcttatgattttcgtaaagtctctgcattattgataaagtttcttttgctgaaaatccaaagaatctatttgcatctctttgaagttcagttaaatcgtataatgctggagaatattttttctttttactttcactaacatctacaatttttcctttgctgcctttaactagagcttctatcttttcagctctctctttgttaaatattttaaaatctccagatttatcgtgccaattcatggagaagctttttacctttccctctatagtataatagtcctttggtttaaattttcttatctcttcttctcttgaaacaatcatatagagcgtaggtgtttgaactctaccagctgatagctgtgcattatatttgcaagttagtgcacgtgtaacattaagtccaacaaaccaatctgcttctgatctgcactttgcagatttatataaattttcgtaatcacggccatctcttaaatgtgcaaatccatctcttacggccctatcagtttgtgaggatatccaaagacgctttattggctttttccactttgccatttcaattatccatcttgcaacaagctcaccttcacgtccagcatctgttgctattacaagttcgtctaaatcctttctttccataaccttttttatatcatagaaatgctttgatgtatttttcaaaacacttaacttcatattcttaggaagcataggaagtgtatccatactccattttttatacttttcaccgtagctttcagggtcagctaatgaaaccaagtgccctaatgcccaaattactacatatttatttccttctaaatgagttttcttattaatatttgcttttaacactttggcaagatctcttgcaacactgggtttttcagctaaaacaagtatttttcccataatatcatcctttcaaattgaggtacatggaaatttaaagtaccataactatatctagccatataccttatagaaaaatcaattcacctattaaatataagattgatttcctatatataatataacacattatttataaaacagttcaactattgatctataatatagaaaagtagtgctatttaccctttcacatatatataaattaagtttagaattgttttactctatttataattatgatataatcttaactatctaaaataataataataataagggcataataatagcccattgtagaaaggaagtaatccgtgttaactgtaaataatgtaagtttaagatatggtggcagaaaactctttgaagacgtaaatttaaaattcaccccaggtaactgttacggaataattggagcaaatggagctggaaaaagtactttcttaaagatattatccggagaaattgagccaaacacaggagatgtttcagtagatagcaatactagaatctccgttttaaagcaggatcactttcaatatgatgaatatgaagttttagaaactgtaataatgggaaatgaacgcctttactcaatcatgaaggaaaaggacgctttatacgctaagccagattttagcgaagaagatggtatcaaagcctctacactagaaggagaatttgcagagctaaatggatgggaagcagaatctgaagctgctacacttcttcaaggtctaggcatttcaactgaacttcacagcaaaaaaatgtcagaattaattggtggagaaaaggttaaggtgcttttagcacaagctcttttcggtaatcctggaatattacttctagatgagcctactaaccatcttgacataaaatcaattgcttggcttgaggaatttttaatagattttgaaggaactgtcatagtagtatcccatgatagacatttccttaataaagtttgtaccatgatagccgatgtagactatggaaaaataactttatatgttggaaactatgatttctggtataaatcaagtactctcgctcttgaaatgacaaaggatcaaaataagaaaaaagaagaaaaaattaaagaattaaaagacttcatagctagatttagtgcaaatgcttcaaaatcaaagcaagctacttcacgtaaaaaaatgcttgataaactaaatcttgaagacatcaaaccatcaaatagaaaatatccttttataggttttaaaccagaaagagaaccaggaaatgatattttaactgttgagaatctttcaaagacaattgatggagaaaaagttttaaataacgtaagctttatagtttctaaagatgataaaatagctctagttggagataacgaaatagctcaaactacactattcaaaatactttctggagaaatggaaccagacagtggaagctataaatggggaataacaataacaaatgcttattttccaaaagataattcagagtacttcaatgactgtgatttaagtttagttgattggcttcgacagtattcagaagagaaatccgaaacttatataagaggttttttaggaaggatgcttttctctggagaagaagcgcttaaaaaagcgagtgttctatctggaggcgaaaaagtaagatgtatgcttgcaaaaacaatgcttacaaacgcaaactttttaatgtttgatcaaccaacaaaccatcttgacctagaatctataacagctttaaataatggtttaacaaattataagagtaatttaatgttcacatcacacgaccatgaatttattcaaaccatagcaaatagaattatagaaatcactaacgatggaataattgatagaaaatgtacttatgatgagtaccttgaaattcaataaataaattggggcattcgaatttagcggatgccttctatttttttaatctaataaaaaatatagctattatatgcttcattttcttaagattttttacttaataaataatcgaggtgaaattcttgaacaacaacgtgttaaatcaggtattaatgttatttttaatgcttcttgtaggcatatatgcttcaaaaatgaagtatatagataaaaaaatgaatgctggactaagtaatcttttacttaagataactcttccacttctaataataaactcttttataactatgaaattttcaaagtctgtattaaacgttggtgaagatattcttttatacaccctaataattcatatagttttagttctattttctaaattcgcttatatgaaagttaatgatgctcaaaagggtatctcaaagtttgtaacagtgttttcgaactctggttttatgggctatcctgttttaagaagtatttatggcgaaaacggtgtattttactgtgctatctttggtataattttaaacctctttatgttcagttatggaataatggctttaaaaaacacaaaaggcaattctctaaaagaattaaaaagagctgctgttaacccatcaattatagctactgttattggcttttttatatttattctaaaaataaagcttcctcacttaatagctctaagcattaattccgtaggctccatgacctctcctctatcaatgataattgttggaataatgctagctgatattaatttatcagatttatttaaagacaaattagtttacatactaacgatagttaagcttttaattgtaccagccataacttttgtggttttaaaactcttaaacgcaaatcaaacagtcataggtgtaatagttgtacttgaggcaatgccagctgcttctaatgctgctgtaatgagtctccagtatggcagtgatgagaatgtagccttgaaacatatttttataaccacagtattatccataataatcatacctttggtaattaaattagtagtataaaaaaatgagatggttttaatcatatgccatctcatttttacgttataatattattggttgattatcttaacgtttttctcatacttattttttaaatcttcatcgatattttcatcagtaataacagccgttacatcttctaaattataaaatccaaaaaaatcttcttttccaattttggaactgtcgcaaagtatatacttttccactgcgttatctaatatgattttttgacatgcaccttcctcttcatttgaggttgttacattattatcgcaaattccattagttcctacaaaagcgattttaaccctcatgctctttaaaatttcattagtaaaacttcccacaaatacatctgtacgctttctatatctgccgccaactaatatgacttcatacctactatcatccttgaaccttaaaaatacaggcattgaatttgttattaccttagcatatgaaacatttatataatcatatatgagttcgtttgtagttcccggtcctatgtatataatatcattctcttctaccatactagctgcaattttggctacatcttttttttgttctatatttatttttcttttttcattacttgaaagttctttaaaatcatcttttgctttctgagttactttttttgctccaccgtatattctcttaaggaatcctctttcttcaagtatctttaagtctcttcttatagttatctcagttactccaagcttctcatttatatctgttatttttattatattattctcgtctaacatatctactatcttttgtaatctttcttcttttaacatatttaatcctccaggaatagaataagatgtatgattatatattatcacttttttagtaataaccacaatttttttatacaaaatgataaaaaaatgtaacctttattatacttaaatctataataaaggttacataagttatctttatattctctcaagctttacttttttcattatatccttaacagtttttgtctcaacccaacctgtctcttttatcatagcattagctgttccacaagctgtccccagcgctataattttttctatattataatttctctcaaagccaactgcaaaaccgccaacaagtgaatctcctgatcccacaggatttatcgcctttacctttggaatggttactttaaataactccccgtcaaaacctactaaagaaccactagctcctaaagatattataacgcattttattcctcttttattaagcacctttacatgctctattatatcattttcacctattatagaacttcctgtaagcatttcaagctcgtccttgttaggctttattaagaaaggctttgcctctataccttcctttagtaaatcaccactagtatctaaaagaaattttttatcgtttttatttgctttttcaataagctttgcataaacattctttggaacgtttctaggtgcacttccagacgcaactattatattacattttaccaaaagcttttcataaaccttcataaattgatcttgttcttcttctgaaatttcaggacctggttctaaaatttcagtttgaactaaatcatctgttataaacgcaaggcattcacgagtcgatgcttttactttgacaaaatcactttttatacctattttcttgagctttgcttcaataaactcacctgtttttcctccaatataacctgtagcaacaatatcctcacccaatatatgtgctacattcgcaacatgtaagccttttccgcctgctgtgttctctacagctcttgccctcataacttttcctttaactatatctcctatttcatacctcttatcaacagatgcatttaaatttacaattgtaatcaagctcttccctcactgccgcacatcttaatttttttaataacaatttccttcattgcttcttttccaggagtcatatagtttcttggatcatttgcatctggatgttctttaaaatattcttttaccgcatcagagaaaggtattttgagatcagttgcaatatttaccttacatattccaagttcaatcgctctcttcactaaattttctggtacatctgaagctccatgaagtactaaaggaacatctactttttctcttatttccttaagcctttcaaaatcaagctttggctcacccttataaagtccatgtgcagttcctatagcaaccgcaagagaatcaattcctgtcctctctacaaattcttttgcagcatcagggttagtgtacattgcatccttttcatctacaactacattttcttctcttcctccaagcattccaagctctgcctctacaactgtaccacttaaatgtgcatactcaacaacttctcttgtaactttaatgttgtcatcaaatgacattcttgaagcatctatcatagctgaagtaaatcctacatctatgcaatgtttaagtctttccacatcttcaaagtgatctaaatgcattgctattggtatattattatgctttgctgccgcctccttagcaatggctattaaataatcctctccactatattctatagttccaggagttcctgcaattattacaggcgaatttaatgcactagctgtttcaaccactaccctaaatgtttcaagattgtgtatattaaatgctggtactgcataatgttccttttgagctttaaccaataatccttttgttgtaactaacataaccttaacaccttcccttcattctttacatggcttaaggatagttataaattaccttaggcctataatgcttattattcctttggataaccaccgttgtcccatttttcgataaattcatcaaagaaatgttcgtttccaaattgacctttatcattttctataagctcatctattccttttattatctcttgattttccttagtaggcttgtactttgcttccaagaatacatctattatattttcaataagacctatacctgttattcttccaccaactgctataacatttgcatttaaatattcctttgcatatcttgcagttcctacatctcttactaatgccgctcttataccctttaccttatttgcagaatttgatattccaactccagttccacacaaaataactcctaaatcagcctcacctgatgcaaccttttctgctgctgctttaccgaatatagggtaatgcgttcttacaaaatcgtaggttccattatctataactgtatgtccttttgattttaaatactccgaaatcttcatttttatatcaggaactatatgatcacaaccaattgaaattaccatctttactacctcccgttatttataacattttatttaacatgtctactcttatttgatgtcttccaccagcatatttctcagctatatatgcatcaagcattccttctgcaagtctctttccaacaattcctgccccaatagcaagcatattagctgaattatgctgacttgtcattttagctgaatgttcatctgaaacctctgcacatattattcccttatgcttagcacctaccataaaagaacctgcaccatactcatctattgctactgccctatctgcttctttattcataacagcttgtgcaactaaacttgctgacttaacaagattaatccccttttctggcgttttatctattacttctatacccttacttttcaaataattttttaagtgttctttaagttcaaatccatctgtatctgctcctatagctattttcataaaaaatttcctccctacataaattaaattttttactttttttatgttaaaacttttatattattctccactgtggtatactaatgttactacacacaatattaatccacagaagaggaaagtaaacttattgattttctcttctcacattattatctatctcatattttttaatatgggattatttttttatgagcatattatcttagctctgttttgatattgctttttcaacccttcatctatattcttgtctgtaataatgcctgtaacatcttctaaactataaaaactaaagaaatcctcttttccaactttactgctatcacatagaacatatttttttgctgcattgtccattattattttctgacacatcccctcttcttcatttgaagtagttatgttgtcattatagataccattagtcccaacaaaagccgtcttaactctcatgcttcttaagttttcattagtaaaacttcctacaaacacatctgtgtgagatcgatagtgtcctcctacaagtatgatttcatatcttttgtcatccttaaacttaagaaaaactgacattgaattagttataacttttacatatgaaacatttaaataatcatatataagctcacttgtagttccaggacctatatatataatgtcattttcttcaatcatctcgcttgcaagtttagctatatgccttttttgttctatgttgatttttcttttttcattgttggaaagttctttaaactctactttattgtttgcatttacttttttggctccaccatagattctttctataagacctttgttttcaagaacttttaaatctcttcgtacagttatctctgtaactcctaacttttcatttatgtccgttatttttataatgttattagtttcaagcatttctaatatcctttggaatctttcttcctttagcatacgtactcccccgcatctaactaaataagactatatacaattcctgtctacgattatatattatcacttaatagtatcattttcaatactgtttatgattatttttattattttgttgaactttattgttctactttgttttaaataaaatccaccaaatggtggatcttccttttatctatccttaatcctcagtttttacttttgcatattctgtattacgttttttcatttgttttgcataccaaacaaataatgctaaatacgctgctagtgctaatattacatatagtcctgtagtgatatttcctccttgaaaaaacttacctataagtacagaaaggaacttttcaataggaccctcacaggttgaatgtgatattaaggttgatgttgataatccttttggaaatgctcccacttgctttgctaagtttgttacacaaggtgcaattactgtacctgcccacaaaaatattggtatttcaagtattccaattattatcatccttatcatcttaccgcgagtaaccaccaaaagcgctggtgttatacccattgctataattccacctaatggtaaaagtttatttcctggtaaaattaacgaaaatatcaaaagtattggcgccaatatattagccacagcccacatctccgctctacctgcaataaacggccagtcaatacctatattaaaggttcttccctttaatcttttacttaaaaagttagttataccttgtgataatggttcaacagcagctataaaccaagaacctattgcagaaaatagctctagacatgttgcacctataaatgccaaagtgaatatttttataatactttgatgtcctaaaactccaacaaaaactcctagataagcacctattgcaaacttgcttccccaaaaacctattttgttattaagttgagcagcatcaaaatcatacttatctaaaaagggcagaaacttatcaattaacttatcaaaaaccataactataggattcatcatataatttaaatgtgtagttgttgttggattagtgtcaggcatgtttaaaagatcattaaatgtaggtttcattaaatcagaattgataatttttaaaattccgagaaatacaacaaatatagttgcaacaagcagatttttagagtaaaacattattaatattccgcaaaatgctggatgccatacatcaaatatatcaacatccaaggtattggttttattcaaagctaacattataacatttacaattacaagaataaacaagaaaaataacgtatacattgatccccaagttatagtagcaactggcgcccaaccaagatcagttatagataagtttatacctgttgatttaacaaatgcctgaagagcacctgaaaaattagttgtaagtaatgaaattatttgtccaattgcagttaaagcaatagcaagcttaagaccaccttcaattgccttacttacttttacacgcatcaagattgctaaaaccgataaaacaataaacatcattggtgctgcacccaaatttattagtggtttaaaaacagcattggcaaattcaacaattccattcataaaaatttcccctccacaatttttatctgtaagaaacccaaatcgcaactttaattattcatattctaaaatcagaaaagatgtataatttaataactaaactggttttcttaatatatttcacgtttttagctaaacattttccaatgctgcacaccctttttatattttttctacacacaatattgtccacagaaaaggaaaatgtttaaaatcttttgattattttttacctaattttttcaaaacactttcgagttcatcaaatacaggctgagccattgctggtatcctatatagtatagctcctgcttcaacgactggaatctttatttcaaatccaacatcaaccttggagattggtgtaaaaacatcatattttgaaataagttcctctgttatatccttaaccatcattgcatctgctacaacctgatatcctctagctttcatttcctgttctattgcgtccttaatttggtgacttgaatttactcctgcaccgcaagcagctaaaatttttatcataataattaccccctaaagttttgttttatattttaagacaatttttatatattttttattgtctgtttatcagtaatgaactcaaaaatttcttcttcattatctgttttatttaatttgtccatattttctttattagttataaaatccattatgtttgctaatatatttgtttgagcatcgttttcattatttataatcatgaataaatacctaaccttcaaagtatcctctggagctatcatatttttgaactccacttcttttttaagtttcacaaaaacaatacgcttacttaagcagtattctctttctgtatgaggtatagccacattatattcttgtccttctatcacgcttaaatccatacctgtaggatactttttttctctttctataatcccatctataaaattatcctttactaaacctttctgtataagcctttgccctatttttttaaagatttcattactatctttcgcgtcttctataaaaatcaaatcttctttaaacaaattacttatttctttaatcatataatcttacccctctataatattatactttatattcatgagttattactgtttgcttttgttctgttatgttatgatttcgtttacatttatatagtataccttatttttccatttgtcaattcatattttgtgatacttttatttagtttgtgattgtttctgtcatatttgtttctgctaatattctacaaatatctttgtatattcactttgtaaaatctaataaaaacaagctttacactatactaatccctcctttcttccttacattctcctgaaatttcaaagtaagtgccacgtaagcgattactaaaaaatattatttttttagtaataaatgttcacaacgaacacaaatcgctcataaaacacattgaagttactttatttttactgaattttatctttacttttttatagtaatcgattactatattattataaagggggagttaaaatggatatcataaatatgttagatgaaaaattcaagaatatttttaaaaggcattatgaaaatgttttcttttctccaggaagagttaatttaataggagaacatactgattacaacggtggacatgtatttccttgtgccttaaccatcggtacttacggattagttgctagacgaaatgataataaagtattagcttattccttaaattttgataatttaggtgtaattgaatttagcttagatgatttaaaaaaatgcaaaaaagatgactgggcaaactatgttaagggagttatagatacttttaataaacatggtcacaatatagaaaatggttttgagattcttttttatggaagcataccaaatggatcaggtttatcttcttctgcttctatagaagttttaactggtatcatactaaatgatttatttaaattaaatattaatatggtagaaatagttaaaatgtgccaggaagcagaaaattccttcataggtgtaaactgcggtataatggatcaattctccatcggaatgggtaaaaaggattgtgccatactccttgattgcagtactctagaatattcttatagtaaattaaatatgacaggctataaaatagtcatagcaaatacaaataaaaaaagaggccttgcagattcaaaatataatgaaaggcgcagtgaatgcgaagctgctctaaaagaacttcaaaaggttaaaaatataaattccttaggcgaacttacagaggctgaatttgaagaattaaaagacatcatttcggaccctgtaaaactaagaagagccagacatgctgtttatgaaaatcaaagaaccttaaaggctgttgtttcacttaataacaacgatttaaaaaccttcggaaaacttatgaatgaatcacatatttccttaagagatgattatgaggttacaggaattgaactagatactttagtttctttagccttagagtcaaagggagttatcggctcaagaatgacaggtgcaggcttcggaggttgcactgtaagcatagttaaagaagactatgtagacgaattcatagaaagtattaaagcaaaatatacagaaaagatcggctatgaaccaagtttctatattgtaaacatagctgatggtgctaaaaaaataaactagtttgaaaggatgcgttttttatgtcaattttagtttgtggtggtgcaggttatatcggatctcatactgtacatgaattaatcgaaagtggtaaagaagttgttatcgttgataatctccaaagtggacatttacaggctgtaaataaaaaggccaaattctataaaggagatattagggacagtgaatttttagataaagttttttcagaaaacaaaattcagtcaataattcactttgcagctaattctctagttggagaaagtatggaaaagcctcttctctacttcaacaacaatgtatatggtatgcaaattttacttgaaagcatggttaaacataatattaaaaatatagtattctcctctaccgctgctgtctatggagaacccaaaaaaattcctatattagaatcagatgatacaaatccaacaaacacttatggtgaaacaaaactaactatggaaaaaatgatgaaatggtcaagcaaagcttacggtattaactatgtagcactcagatatttcaatgttgctggtgctctagatgatggtagtataggtgaagatcacaatccagaaacacatttaataccacttatacttcaagttcctcttaaaaaacgtccatttataactgtgtttggaacagattatccaacaccagacggtacatgtatcagagattatatacacgttatagatttagctgctgctcatattaaagctgtagaatatttggaaaacggcggaaaaagcagtatatttaacttaggtaacggagtaggctttagcgtaaaagaaatgattgatgctgccagggaggttactaaacaaaatatcaaagtggttcttggagaaagacgttctggcgatccagcacaattagttgcttcaagtcaaaaagcaaaagaagttttaggctggtcacctaaattcacaaatgttaaagatataataaaagatgcctggaaatggcacgaaactcatccaaatggttttgatgcttaggaggctatgaaatgattaatcatgagataaataaacttttagctttttctctaaaaaaaggtcttatacaagaggatgataaaatatattcttctaatatgcttgctggtttatttaatttggacaatttctacttcgaagagattagtgatgtaccaagcactgccacagctattttgaatcaactattagcttacgcagtaaaagaaaatttaataaacgacacagtagctgaaagagatttatttgacacaaagattatgaattgtgttatgccaagaccttctgaagttataaacaattttaatagacttcttaataattcaccaaaggaagccacctcatattattataaattaagcatagcttcaaactatatacgaaaagatagaatagataaaaatataacctggaagacgcctactgaatatggtgatttggatataaccataaacttatctaaaccagagaaagatccaagagatattgcaaaagcaaaattatctaaatcaacctcttatcctaagtgtcttttgtgtaaagaaaacgagggattttacggcaatattaatcaccctgcaagacaaaccttaagaataattcctcttgaactaaacaaaagtaaatggtttttgcagtactctccctatacttactacaatgaacattgtataatattgaataatgaacatattccaatgaaaatcagcagaattacctttgaaaatttactgtcttttatagatattttaccacattattttgctggttctaatgcagatcttccaattgtaggcggctctatattatcacatgatcactatcaaggtggaagatatacctttgcaatggaaaaagcccctgtagaaaaagagtattctataaaaggatatgaagatataagtgtaggaagagttaaatggcctatgtctgtaataagaatttcatctaagaataaaactaagcttataaacctagccgagcatatattgacttcttggagaaactattcagacaaaacacaaagtatattaagccatacaggcagcgaaccgcataacacaataactcctattgctagaaaaagaaatgaagaatatgaattagacctagtccttagaaataatagaacggatgaaaattatccacttggaatatttcatcctcataatgaagttcatcatataaaaaaagaaaacataggtcttattgaagtaatgggattagctgttcttcctgctagattaaaatcagagcttgctttaataaaagagaatctaattgaaaagaaaaaagatatttcaaatgatagtacaatttcaaaacacaatacttggtacaaatatatcttggataactacaagaatatatcagaagaaaatattgattgtatattaaaaaaagaagttggcattaaattcttggaagtattaaagcatgcaggtgtatttaaaagaaactcaagtggactttccgcttttgataaatttattaatatattataaggtgatgaaattatgaaaacaactatacttgaagtagctaaaagggccaacgtgtctgttgcaactgtttctagggtaatgaacgacaactacccagtaaaggctgaaacacgcgaaaaagtactcaaagcaataaaggaattaaactatataccaaatatgcaggcacgtgaattaacccaaaaaaaatctgctactataggtatagtttctccaagcataagcaacatgttttttacagaggtcattaatggaatagaaagctatttaagggataaatctttatccttactattaacttgcaccaataatgatgtagaagaagaaaaaaaatgtataaccaatttaatatcaagaaatgtatctggtatagtcgtaataagtcctaatactagtaatataaagaacggcttttacgatgatctatcaaacagcattccttttgtttttataaatagtaaatatgtagactcaaatatctcttctgtttcaaatgatgaatccatgggtgcacataacgctcttaaatacctgcttaagaacaatcataaagaaatactttttgtaagaggtaaagatagctactcttatgatattaaggaagaggtttatgttagtactatgaaggagctaaatctttttaatccacaaaatattatcaacataggaaacggaaacagcagcgaaactgttgataacacctcctatgcttttcttgaaattttaaataaaagtaaggcaacagcagcctttgcatgtaatgatcttatgggtgttggaatattaaatgcttgtaaaaaactaaacctagctgtacctaaagatttttcaataataggttatgataacatagccttaagcaaatttgttgaacccaagcttacaactgtagatcaaaatatgtttcttcttggaacaaatgcagcaaccttattaatagaaaaaattgattgcaataataagtatagtaaaagaataatactaaataattacatagttgaacgggatactgtgagctctatatagctttcagttttataaatttttcctaaagtcaaagccttataactcagcaatactttgcctctaaaacatattttccaataaaaaaatgttgcagtgttaacatgttatatgctaacactgcattagttgttgttttttacaaaatactttaaaacatccttgaacatcgtgttattaatcttatgtatacatatcctatttctaagattttttctagtattctatatcgctaaaatctattagtttcttctcgtaagatatcctcttaaaccaataagcactctttttagcatatctattttgagttttaaaatccacatagaataatccataacgcttattgtatccattactccaggaaagcacatccataagtgaccatacaaaatatccttttacaactacaccttcatttttcgctttaagtatagcctctaaatgcttattaatatagtctatacgcggtgtatcgtctatttttccatctttgaaatcatccttgtagcccattccattttccgttacatatattttcttgtaatttgggtactcattttttattctaactagcatatcatgaagtccctttgggtaaataggccaatcccaatctgttgtcggaacctctggattattaacacgttcacctattcctttaagtgcaaaaatacttgttcccttttctcctgttccattatggtgtattctgctctctccttcatacgcctttaaaaaatgacttgaataataattcattcctaagaaatcaatctttgaagaagcctttttaagtacttctaaatccccatcatatatcttaagctccccaccattcttagacattatttcattaatagtcttttcagtttctttaggatattctcctttaaagcatgcatcaagcataaatttgtttgaaatcatataatctaaataagctgcttctttatcttctttagaatcagttattgggtatttaccctcaagtgtatgaactattcctatttctccatccaaattcatactcttatataattcaactaccttagcatgtgctaccatcatgttatgcatagattgtgctgcctttggtatgtcatactttatacttggagggaagtttcctattatataaccattttgagcaactgcccaagcttcattgaaagttatccacttctttaccctatctcctaaagcttcaaaacaaacctttgcgaacctaacaaaataatctatgttattcctatttaaccaatcgccatctttgaacaaggttaaaggtgtatcaaaatgatgaagtgttacaaaaggttcaacattattttttatacattcgtcaattaaatcactatagaatttaagtcctttaggattaacctcaccttttccatctggaataacacgagaccaagcaattgatattcttattccatttactccaaactttcttgaaaacttaaggtcctccttatacttgtgatagaaatcgcttgctgtatctccagtaaatctgccttctttttttagatattcatcccaaatacaaggtccttttccatcttcctttgtagctccttctgcttgataagctgctgttgctcctccaaatataaaatcctctccaaagttattcattacttgctttcccttctttctaatttatataatgttgaaattttattgcactataaattattcatttattatatccaacgcaaattttaaagctccaacagggtctctagttaattttacatattccttacctgttgttgttgctgatttagttcctttagatgcgcaatctgcctttaattcctcatacatagatgccatctgaggtgccaatataataagatcataatccgctattacatccttatgctgtccataagccatagctattgattctacgttaacgccttcttgttttgctcccttagttattgcatttgcaagcatactacttgtagctccactagcacaaagtactaatacaagctgttttttatccgttttactttctattttaacctttggtgttggtttttgttctacttttaaagttgctttttcttctaattctccatcaaattcatgcttagccctttctgcttcttccaaaactaattctctatcataaaccttgaagaatggatagtacattacaaaatccactactaataatagaggtgctaatataaaggctaattttgcaaatcctgttcctaatatcaatcctattggtgcaggagttgtccaaggaattatataaataaagccgttcattcctaagttatctataaaaaatttaaatatccatacatttaatattggtgtcaatataaatggtacgaagaatattggattcagcacaattggtgctccaaacaaaattggttcatttacagcgaagcacactggaattattgaggttcttccaactgcctttaactgctttgatttagctatgaacgcaaacataactgttaacattaaagtagctccggtacctccaattgttgctataaaataagaagttccgtgagttagtacatatgttgcatgatgtccagcttgatgtaattttaagttagcttcaacatttgcaatatatatagctgttactgctggttctactatagaaggtccatgaattccgacaaaccagaacattgccatcgctccatatattaccgccaagcctacatacccatctgctgctgtaaataacggctttaagacatctaatatccaagaactgaaaacctctcctgtaacttgtctaaatactaaatcaaataaccagaagaataatacagacgccgctaaaggtatcaaatcttcaaaagtttgtgctacattgtgaggtacttcctcaggtaacttaattgttacattattttttacaaataacttatatatatttggaactataaacgcaactacaaacgctgataataatcctttagtgcccataaaatcgcttgagaatccgccttttataggttgtactcctattaaaataaagcatatgatagatacaatcattactgacacattatttatttgtcttagtttaggcaatttaccattaatactatctgttaagctcttggcaatagttgctaccattaataatgctaatattcccatagagtagttgtaagccttcataagtatatcattaacattgtttggccaataaaaaccccaagcatttggaacacatgctataagtaagaagatacttgaaaataaaataacaggcatacaacttagaaatccatctctgattgccctaagatatgggttattagatactttttcaaagaaaggtttcattttttcaattagtgcgattagttttctcatcagaatttcctcctatatttttattataaattataaaacaaacaaaaatatccatctgataatttatagccttatctaatttaccttcttgtataaatttattaaattctttacaaggtctcttaaaagcattactgtcattaaatgatcctgcgcatggacaactaagaatcctacctctatcttcttaccttgagcttccatttgaatcattttagtttgaacgttatgtgcttcagttataagatcatttccctctaaaactaattgctgtgccttatcataatctccgccattagctgcatttaaagcttccaaatattttgatcttgcatctcctgcataagccactatctccattgtagttaattctaattcttccttattcataataatatgcctccattttaaataatttttattttacttatgactattttaattcgtcttatatattatttattactccacagtatttggaatacttattctttaaggtcttgtctaactttgaatctgtaactaaagcagttatgtcttcaagcttatatagagtgtaaaagtcttgtctttctattttgcttgaatcgcatactaaatacctttctaatgcattgtccattattatcctttgacattgaccttcttcttcgtttgatgtcattatgctattattagaaacaccattagcacctataaaggctgatctaactctaatttcttttaaaatctcatctgtaaagcttccaataaaagttcccgttttatttctcaatctacctccaataagtattagctcaaatctatcatcatgcttaaatttttcaaatacatttatacagtttgttattatttttacgggagaaacttcaatgtaatcatatatatattcatttgttgtacctggtccaatatatacaatgtcattttcctttataagacctgctgctagccttgcagcctccattttaccttcggcatttatatttcttttttcacttggtgaaagctcctcaaattttatttctccttttgttcttgctccgccatatattctaattaacttgccctgttcttctaaatacttgagatctcttcttattgtcatctgtgttgctttaaactctctagttaaatcaaccactcgaattattccaaatctatttaaattatctagaatcatttcatgtctttgttcttttaacacattcatcatcacctcatatcgaagtaaatttaattgtaattttccacagattcaccatttcatgggttagttatcgttttctataagtgcgcttttttatgaattattttgttcttttatgtacttgttttcgtttacatttatataatatatctttaaataaggtttgtcaataatattgttgtgatatttttattttatctatgttctgtttttgtttgttaaaatacaaatttttttgttttttaagcataaaacaataaaaatattacattattcaaaatcaaaccgtttacactgctcttttttactgttactattttgttaaagaatactatgacagtaatttgattttttctaacacaaaataaccgttgattacttttaatatttaacataatactttatagaaagcgatttctattagataaagttttaagattcactaaaactataaaaacctttagtatatgaaaatatccctagaaaccacttctagggatactcttatttctcaactttacttatttcatcatttctattttcaaccttcatactataaaaactttcactttgtggcaattccattctaaagcacaaacaattttgaataaaaacctctgcattttttacagaaatatcacttacgtgtccaccaaatttcttatcatcactcaaaaaatggaagtgatatcctggaacattaagaccttccacataatccggacacctaaacccaactatatgtcccttaacattttcataattaaacacaggttgattctttacaacctcagccattggcttataaggcatgctttgcttcacaacagttctagttttaacataattaaagctgccttttatgtaaaaagcataaaatatattcttgctatcaataaatccatctaatgtttcctttaaagcctcatatgaattacaagcttcaatattttctgtattataattttcaagtttagtaatcacagcaaaaggaactgaatcattttcagagcatacatagatacttccgtccggtttagttctataaaatattccatctaaaagtgttagctctccatccaagtccttaaatgtacctataccaaaatcaccttttgttaaaagcttctttaaagatgcacacccatcatacaagccagaaacaagagcgtttattgtagacatttgatatatatgattagggatcacttcttcaatcatttttcttcacctcaaaccaatttatgattaaatcatgtatagggctatcaggtgattattaaatctcacataaaattcaaatataactctccccccatacttaaaaacaataacacttaattattatttttgcaatttataatccttggcgttaatcacgtcttttatggataaaacaaaaaaagtagaaaataataggataatacctcttgttttctactttatatctgttgtactaattcttatagataatcttctatttcctttttattttttaattcctctacaagatgttttaattcttgatccctattcttatccattattaaaactacgtttcctgcatccactactatcaaatcttttactccaaaacatattattaaattttcacttccaaaaatcgagcagttttctgtatcttccaaaaatacattgtcacttatagtattccctccctcatagcttttaagaaaccttgccagagacgagaaattgcctaaatcatcccattcaaaatttgcttttacaacatatgccttacgtgttttttgcattattccaaaatctacagatatgccatctattattttatatttttcgtttattgtttcttcttctgtttttgttccaacattctcatatatctccatcattgctttatacattttaggcaaatatttattcatctctcttaaatacgtatctgctctccagacaaacatcccactattccagagataatttcctttacttagaagatcttttgcaacctctatatttggtttttcaagaaacctttcaactttatatatggattcataattaatgaccttatctcccatttgaatatatccatatcctgtttccggtctagttggcgttatgcccattgtaacaagacatctttttctttctacaacctcaaccccctgccttagggtatctataaactccttctcattttcaatataatgatctgaaggtaaaactatcatggtcgcatcgctatctttttttaaaagtttaaccgccgaaagacctatacatgtggcagtctccttgttttcaggttccgtaaatatattactacggtttatttcaggaagttcttcttgtattttgtttatatatctttcattggtcacaatatatatattctccttatcaactagagttttaattctatctacagtatttcttaaaaaactcttattgtgaataaacttaagaaactgcttgggactttccttccttgaaagaggatacaatctcgttcccttgcctccagcaagtacaagtgcatataacaaaaaaaacaccacatttacttattgcttatcattttataatatgatatgcaattgtatgtggtgaataacattttacctatccttaatgttttaaaatcgagactcccatcaattttaatctttcttaagcaccgaaacgcatttgtttccctttatataaaatctccacaaataatccttagcttcctctgcataatctattcccactcttttagcttctactatttcaaaagattcattttttccctcttcaatataaagttcatctccatttagatccattaaattttgttcacgacgtatttccatcgcactacatagctttgaaggaccatttgttaaattcttaagttgatatttagtaagatcgttaaatagctttttaaatcttctttcactcataacttcaattccttctattggttctatagcccttatcaaaactccttctggaataccctcctgcattgcaactacattcatgcagtagtataatccatatataaaatatacataagcatgccctgctggaccatataatgcttctgttctaggtgtccttcttcctccataagcatgagctcctttatcattaattcccctatacgcttctacctcaacaatcttgccagaagtccttattccgttcacctcatgtactaacacctttcctagaagctcttttgctacaactattgtatctctactataaaattcacgaataagcttcaagtttatcaccctgtataacgataattttcattatactttttcctttctagatattattgttcatcgataatattataacttatttagtaaaacaaactacaattctattaatccaataaactctttaattatacgcattaacataggaacatgtagaaacttttgatagctcaaaaattttgtgttttcttttgatttttaaattattatcttctttttagtgcagtattaattctatctaaggcttcctttaaggtgcttctactacacgctatatttactctttcaaagccatttccctcttctccaaaaatatatccttcatcaagccacaccttcgcctcttcaagcatgaagcttttaagttcagaaacagacatgttaagttctctaaaatcaagccataggagatatgttccctcaggctctatcaattttattttaggcatatttttatttatatattccttcacgaattggatgttatcctttaaataatctatgagttcacttagccatacttcacttttattataagctgctatagatgcctccattccaaaagcattaggccacagtggtacacttcttttcataacctttagtactcttgctcttaaactactatctggaattataagactcgatacctgaagtcctgcaagattgaaggttttacttggagaaatgcaaactattgaattatgttttgcttcttcatttactgctgcaaagggaatatgtttgttaggctcatatataagatctgagtgaatttcgtcggatataactataacattattttgggagcatagttcttctacagtatttagttccttctttgtccatactctcccagtaggattatgtggactgcataaaaccataaccttaactctttcatccttaagcttttcttttaggtcttcaaaatccatctcatatcttccattttgaagtttaagagggttctttaagatagtacaaccattgtttgtaattgcgctataaaatggatagtatacaggtgtttgcagtataaccttatcacctggcttcgttaaggcatttatcatcaaattaacccccggaacaatacctggtgaaaaaactatccactctttttttatatcaaatttatgtctttttttaacccaatttattatagaagcataatattcatcacttgtttttacatatccatatactccatgctcagctctttttcttattgcttctgaaatttcaggtgctacctcaaaatccatatccgcaacccaaagaggtaaaacatcctctctttcatcccattttgcacaatcagtatttcttctttcaactactttatcaaaattatacacaaaaatcccctcccatttaaaataaggatgattctctcttaagaaaatcatccattaattccatgaatttttatcaatatattttaatcattctttatttgtattacttccattttttctactgcatcatttattaatttttccttatcaagaacactttcagcttttcttatctgtcctaaaattggttttgtcttaggatgtttaggaacaaatatagtacagcaatcttcgtatggaagaattgatgtctcataggttccaattttccttgatatatccattatatcaatcttatccattgatattaaaggtctaaatacaggcctgtccgcacaatcattacttacaactaatccttgcatagtctgacttgctacttgtcctatactttctcctgttgctacggattccattcctttatcttctgctattttacaagctatactcatcataaatcttctcattattatagtaagctcatcttctctacatttttcaattatctgcatttgaatgtctgtaaaaggaactacatataatgtcatttctcctatatactttgtaagtattctagctaaatccttaaccttatcttttgccctttcacttgtatatggagcactatggaagtacactccgctaacctcaactccacgtcttgccatcatatatcctgcaactggagaatcgattccacctgaaagcattaaaagagtttgtccatttgttttgtatggcattccatttactcccttaattctctttgaatatatgtaggttttctttcttatctcaatattcacaagacattctggattatgtatgtcaactttaacttcatcgttatttttaagtatatatgcaccaacctcgcgatttatatccatcgaatttaatggaaatcccttattcgctctatttgtttcaactttaaaggtgcctttaccactctctttaactgctaaaagtgcttgattttttatagtatcaaaatcattttctatttctgtaacaatacaaacttcagctacaccaaatacatttcttactctatccacaacttcctctaaatcttcgccttttataaaccatcttccagaatcaaatacaaagtcaaatttcactccgttaagtgccgtagctatattgtgcttaagtattttttcaaatttatttttatttaagccttttaaaaatatttcagaagcgtattttaccattaatagtttattcataattttaatctccttaagaatttaagtatcttctctatattatatactgtataatctacttcttcaaaggtattttcaggagaaaagctaaaccttatagctccatcaatttcaccatcatcaagaccaagagcacaaagtacatgactcttgtgattttttttcgatgaacaagcagaacctgttgatgcatatatttccttttcctctaaagcatgtacgaaaacttctcctctaacacccttaagtgatacatttaacacatgtggaagatagtcttctcctactttactgtttatccttacaccatctatattatttagcttatctacaaaatactcttttagatctgaaacttttttataattgtccttcatcttttttgatatatcattggctgcataagcgaaagccgcaatagctggcaaattttcagttcctgatctaaagttaaactcttgtccacctccacatataagtggatctggcataagtccttttctaacatacgcaaaacctattccccttggtccataaattttatgggcacttactgacagtaaatctattcccatttccttaggatttattttaagctttccgtagctttgaactgcgtcaacatgaaattttgctcttgtacttctttccttaataattgaagatatttttttaacatcctgaattacacctatctcattatttacatgcattatacttacaagaacagtattcttttttatactttccttaagctcttttagatttaactttccttcattgtccacatttaaataagtaacctcaactccgaacctttctaactgttgacaagtatttaatacactagggtgctcaatttttgatgttattatatggtttcctggctttgcaaaaccctttatcaaaaaattattgctttcactcccgcctgaagtaaatataatctcatttggcgaaactccaagcgtagctgctaatacttttctactctcaattaatctatcttctgccctcttaccaaataaatgaagagaggacggatttccataatactcataaaaaacttctttcattatatccgcaacttccaaaagaggctttgtagttgcactgttatcaaagtaaaccaccatagtcaccgctttctcttaatgttataaaaatctgcattactcaccagcataaatataaatcatactacattaattgtcaatatccgcattcaatgtgcatataaattaagagctcaaatttgtaattatactaaaaacaaatttgagctctacaacatactataactatgctctagctttattaagctcttcaacaaatttagcagctgtctctgttactgcatcgtagtcaccagttttagctccctttgttagttctcctccagtacttactgctactgcaccagccttaatccaatctttaacattgcttaaacttactccgccacttggcatgaagttagcttgtggaagaggtcctttaaatgaacttattatagatggtccggatacattccctgggaacactttaattatttccactcctaattctaaagcttcaatagcttctttaacggtcataattcccggcatagtaggtattctgtatctgttacaaagtataactgtttctctatttaagtttggacttacgataaattttgctcctgcaagtatacaagctctagctgtctctggatcaagtacagtacccgctcctattattacatcctgatccttataaacctcagataactctttaataatatcaagagcacctggaactgtcattgtaatctcaatagccttaataccgccttttataacagcatcaataaccctagctccctgctctttagattccgctctaattactgcaaccaatccgtactctgacatttttcttatagtttctagtcttttcattttttattcctccctggctttcataagtatgtcatctttttttaattcctcatcacattttatagtgaagatcatttgtgcagaaggtgcactatctataactttcccttgtttgtttcgcatatccttaattgacataactatattatcccccttaggagataatatttcaaccttatttccattataaaccttgtttttttgttctattgttgcaattttcgattccttatcatattttttaacaactcctacgatatcataatcgcgaatataagcataagtcttatggtgttgttttacttcttcaccaaaataaaaacctgttgtatacggtctatgacttggtttttttaagttctccatccatttgggattaaaaacatatttatctggattttctacataagaatccacagcttgcctataggctttcactacagatgcaacataaaaggcacttttcattctgccttctattttaagagaattaattcctgaactaataagctctggaatatgctctatcatgcataagtcctttgagttcattatgtaagttcctttaccattttcagtaatatctttttgttctcctttttcttgttcaaataaatggtatttatatctacatggctgtgaacattctcctctattagcatctctacctgtcatataatttgacaaagcacatctgcctgaatatgccatacacattgatccatgtacaaatgcctctatttcacagcttttaggaagttcttctcttagcttcttaaaatcgttaaggcttaattctctagccattactactctcttcactccaagcttatgccaaaataaagcagatttataatttgtacaatttgcttgtgtacttaagtgaatttctaaattaggcaccacttcttttgccaccgctataattcctggatctgctgctaatattgcatctgcatcaatctcatctagttccttaagatattcttctaatccaactaaatctttatcatgaggaaatatatttactgttatatataccttttttcctctatcatgagcaaacttaattccctcttttaattgttcaattgtaaaattatctgcataagcccttaaattaagtttattaccacctaaatatacagcatctgcaccaaaatttatggccgtttttaatttttctagatttcctgccggagctaaaatctctggtttatccacaatcattcctccatatggctgtcaatatattaaataatcttttagctaattttatcatttcatgccttattagtctatatatcttaattaagttgaaaattataaagcattaattaatatttagcttatatctcaacaaaaataaggcaccgaaaactaattaatgcttcagtaccttatctatgtgtcctctactcttttaccctgcatttatttaacgcctaacttctgtataatcaacatcaattatagtatctttatcagagctaaaagttgtatcttctttattaaaatcatcaattggatctttcttttttacttttttcatttttgaaatttttgatactccccatatagctagtccacctattattataacaggaattaattttataaataacagtgctgctaaaattactatacctaaaatcgcaatatttctaaatatatctttatttaaaaagctcatttgcatcactctctttctctaactttataaaagtattatatcacaattagtgtaagcagtatacaatatcacttaaaaaagtattaataatctgttaactatatttacttcaattttgggcaaacttatattgtagcaaaaataaatcatataggaggcctttcaaatggcaaaaagagacaataaaaataacagaaatgatgaaaaaagaagaaatgatttaggtaaattaaacgttgaagcttctgatgaaataagtgctgataataaagatagaaataatagagacagaaaagataatagaaaagatggcagaagataatttattaatataagataaaaagggctgtgtactcacagtccttttccttattattcacttaatactttttcaagaagttcctttaccataggtggatttgcttttcctttgctttgtttcattacttgacctactagatatccaatagcctgttttttacctgccttgtaatctaaaactgacttttcattgttatttataacatcttcaaccatcttttgaagagcactctcatcactaatttgggaaagtcctttttctttaactacaactttaggctcctttgaagttttaaacatctcttcaaagacttctttcgcagcagtattacttatttcttttgtttttatcatttctataagctgattcatatgctcaactggtacaggtattgcctttgagtctgtttccgtttctctcataagtctaagcatatctccaagtatccaatttgaagccgttttactttcacaacctgcctctactagcttttcaaagtaatctgctaatgctttatcttcaataagtatttctatttccttacttccaagcttatactgatcttcaaatctagcctttctctctacaggaagctccggcatttcttcctttaccttttctaaaagctcatcctttactactatcggaattatatctggttcaggaaaatatctgtagtcattagcatcttcctttgttctcatagtaacagttttacccttacctgaatcccatcttctagtttcctgctttattctaaaaccttcattaaagtcataaagctccttttgacgtttttcttctttttcaagcgctttttgaagctctctaaaagagtttatattttttatttcaacctttgtattgtactctgtacttccaacttctcttaaagatatattagcatcacatctcatagaaccttgatccatgcggcagtccgatatatttgcatattgaagcatagctcttaaagttttcataaactcaaccgcttcctctggagaacgcatatcaggttctgaaactatctctacaagtggcactccaacacggttataatctataagagaatgaggctcatattccaaatgaacaagcttaccagcatcttcttctatatgaattctattaagcctaacttttttaactccatctttagttggtatttcaacatatccgccgctgcagattggaatatcaaactgagatatctgataagctttaggaagatcaggataaaaatagttttttctatccattttatttaacttatttattttgcaatgaagtgcctctccagcctttactgcaaggtgaacaacttcttcatttaaaacaggaagagttcctggaagtcccatacatattggacatgtgttttcatttggtttagcaccgaatttagttgaacagttacaaaatattttagtttttgtgcttaactcagcatgtacttcaagaccaattacggtttcataactcattttttatctctccttttcaagtgctcttgccgctctaaatattttcttctctccaaaatgaggtcctaacagttgaagacctataggaagcccctctttactaactgaacatggtagcgatattgcaggtattccagcaaggtttatgttaactgtgtatatatctgccagatacatttgtaaagggtctgcttttttctcccctattttaaatggtagtacaggtgaaactgggcttaaaattaaatcatagttttcaaaggcttctttaaattcattttttatcttctttttaagcttgagtgctcttttataataggcatcataatatcccgatgaaagtgcgtaagttccaagcattattctcctttttacctcatccccaaaggcttctgatcttgatgtttccataagatcatatacatcttcgaaatcatctggcctatatccgtaccttattccatcaaatctagctaagtttgaactagcctctgctgacgaaataatatagtaagccgaaagtccctcttcagttattggaaggctcatttcgcaaacctcagccccaagacttttaagcttctctattgtatcatctatacattttcttatctctggatctaaaccatcatttaagaattcctttggcatccctattttcatacctttaataccatcatctattccttcaagataatcttctttttcatgttttttagaacttgtgttatctaattcatcttctcccgagattacttctaataattccgcacaatcttttactgtttttcccaaaggtcctatttgatcaagtgaagaagcaaaggcaattaatccaaatcttgatactaatccataagttggcttaagtcctacaactccgcaaaaagctgctggctgtcttattgaacctcctgtgtccgaacctaatgaaataggagccattttagctgcaacaacggcagcggagccaccagatgaacctcctggaaccctagttatatctcttggatttttagtaattttaaaagctgagttttcagttgaagatcccatggcgaactcatccatatttacttttcctattattattgcgtcctcagcttttaatttttttattaccgtagcatcatatggaggaacaaaatcatatagcatctttgatgcacatgtagtttttatcccatctgtgcatatattatcctttattgcaataggtattcctgcaagtcttccaaccttatccccatttgcaatctttttatccacatctttagcttctttaagtgcataatcctcacatagtgttatgtatgcatttatttctggttcatttctttttatattatcaaaataagcctttactatatcttctgattttaaatgtttatctaaaattgcatttctaagctgttctactgtcatatcaagtatttccatgatcaaaagcctccctactctattatcttaggcacctctatcgcaccatctcttaaactcttaacattttgcataagcttctttttatcttcaaaaaccttaggaacatcttttctaaattctgtgtttacctcatcaaattcatttacatttatatcagataaatcaaccttatctattgtttcaaaatgcccaagtattgcttcaaattctcctgcaagttttttagcttcattgtctgtaaacttaagctttgaaagctttgaaatatacttaacagtatctatatcaacatgtttatcactcatatctatcactcctcttattatactttgccctattctataagcttaaggtgtaattctcttcatatctcttggtagaagagatgcctctcttatgttttccaaacctaaaatctgcattgttaatctttcaagtcctatagcaaaacctccatgaggtggcattccatatctaaagttttctgtataaaactcaaactcttcagccttaaaccctttattttttatagcttctaccagcatatcgtggtcatgaattctctgtcctccagttgttatttcaagtcccttgtatattaagtcaaaactctttgaagctccttcaatttcgtcatctggcattgtatacataggtctcttggatagtggatatttagtaagatatacaaaatcactatcatacttctcctttacatacttggaaaacaatctttctccttcagcgtttagatctcccttaggtgaccttttaccatacttgtcaaaaactatttgctgagcttctgagagaggaattctaggtatgctaaccttttctggtaatgttatattatacatttttagctctcgtgcacaagtttctcgtaaattttcaaataaataatttatgaaaccctcctcaagatccattatttcattttcatcttctataaagcccatttcagcatcaagactcacatactcatttaaatgtctgtaggtattgtggagctctgctctataagcgtgaccaacttcaaaaactttttcaaaacctacaccgaccatcatttgtttatagaattgtggactttgagctaaaaatgctctgtgatcaaaataatttactgtaaataactcgcttcctccttctgttcctgaagctaatattttaggagtatgcacttcagtgaaattattcaattttaaaaattttctaaaacattcgcctatttcttcctgaattttaaataccgccataacacttggctttttaagacttacatttctatgatcaagctgtgtttctagtgcagcatttatcttctttccattgatatcaaatggtaacttatcataataaacctttcctagaacttctatttctttaacttgaacttccattccatcaattgctttatcatttttacttaaaacaccctttacttttatgcaagtttcatttctaagtccagctaattgttccttctgtgctacaagttgaacaatccctgttttgtctcttaatctcacaaaattcacatgacctaaatcataaattttatgaatccatccctgaagcgttatttcttccccttcactcatatgaaacacatctttaacataattttttttcatgattatagccctccaattttttttaacataaaaaaatcgcccctataccaaatggtataggggcgattatataacgcggtgccaccctatttagcaaaaaaattgctaacttaatcagtacgaatgccatattatagacatcgatacctattccctttaacggtggacatccgtttaagcctactttcaaaacgattttggttaactactccggaatgttcttcaacttaatctcgttaccggttcacagcttgacgcccggctctctgaaaacttaattaaatttactctttccttcactgcaattttataaaactcatattcaataatgattatattataaaactaactttttataaaatcaatagtttttatcaatttttcataaataattctatttcgctttcaaactcatttataatcttatcagttttttcttcatcgttagattcagcatatatcttacatatgggttcatctgagtcaggtataataagaacccaagcgtcttcataatttaccttaattccctcaataagttctattgactttgatatattttcttctattaagcttctcataattttgcccttattatcccaggaacaagctatttctttttctcttaaaatataatttggtattctttccataagctcagagagctttattttacctctagctaagatgttaattatatttattactatgtttaaagcatctgtactagaaagatatgaaaacaaaacctcttttatatttttatccttttcattcaagatatattcatttaaaatatatctttctgaaatttttgacttaacatatttgcaattatatctcttagctatatactttaaagctttagaagaattaacaggtgccactatagttttaaatttatatacacttattagtatcagtgcttttatactctcatacatttgagtacttattatattagcgttttcatcaataattattgctttatcacaattctcagatatgcaaacaccaaaatccatttttttctctataacttctttttttaacccttctaaatccgcataattatcatatatactatactgaattttaagatctgaaaatatactctttacttcattttttataagcttattttccattgatactgcaaccttcagcccactatttcttatttcttgtatgcacaaattttctttaatataatcttcataataacccatacattctccaaagtctcttaatcttttaaagttatttgctctagttcttctgaaatcttcccttaaaaagctgtttgctatttttttctccatagaccttgatatcattattccatccttatctatgaataatatatttactttttctttattactacctttacaatatatatatacagcagcatctgctttaaaatatgctgtagaaaacctaagcattggtatcgtcatctcttttgcagaataaacctctattcccattgaaataagacctgaaacaaaagaatacttaagcatttcagctgccaaattgtaatctgaacatactacaacctttgaattcatccttaagtttgatgcaaatgcagatgctaatttcgatacaaattctggcgttaattctacatttatttctccacttataccttctttaccgaaaagcaccttacacctattttctccccacacaacatttgtctttattattgttttacttcctataactttgtccggccatattttaactcctgcttttacaacacttttctcccctaccaagcttcctgttccaatggcagattcctcaaaagttgatactcccccgcccacttgaacattatttgacactacgcttcccctaagttctgcaccacttcctatataacaattttcaaatattatacttctctttatagtagccatttcagatataatattatttctacctataacggcaaaaggccctatctctgcaccataacgtatttcagaattatctcctatataaactggtggaataacttttacattatcacttactattgtattttttccaatccatacacccttctgatgctgactagcatctatatctacatctacatctacatatccatttaatatatcaaaattacatttcataaattgctctatatttcctatatccctccaataatcattaaccacataaccaaaaatctctttgccactctttaaaagttcaggaaataattcctcactaaaatcaaactttttatccttattatagaattcaaatatacctggctccattacatatatccctgtatttgctttgtcactaaatatttctccccaaccaggcttctcaataaaattacttattctcccctctgtgtccgtaattgcaactccatattcaagaggtatagttaccttcttcagcacaatcgttaccatagcgtttttttctttgtggtattgtaagatattagttaaattcacatcagttaaagcatctccgcttataaccacaaaggtttcatcaagaaaactctcagcattcctaacactgccagcagttcccaaaggactttgctctataaaataatgtatatttactccaagttcttttccatctccaaagtaatccataacttcatctggaaggtaatgcagtgtaataccgatttcatttatcccatgttttttcaaaagctctataatatattgtaaaacaggcttttgcataattggcatcataggtttaggtaaattgcatgtaagtggtctaagtcttttaccctgacctcctgccataataattgctttcattataccatccccttatacacttcacaggttttaaatcccaacactttgtaaataaaatatatgttaatttaactcttcttcataaattgattatttctctatgaaaatatattaacgtttacattacttgattcatatactatactatataccttttattaatcttctatataattattatatttaatataccacttcaattttccaattactttattttattcttacacaaaattcctacaaatagttaaatatttcatgcttttatgataaaattaagggccagccttttggctaacccttaatttctatttaatcacatcatttaaaatttcatcatactcactgctgttatatatgtactcttctgcagtaccattttctaaattttcaactaaatccaaatctataggcatttcacatattagtggaagtccaagatattccgactgctctttagctgattttttgctaaagacacgcattttatctccacacttattgcacactatataggacatgttctcaacaactccaagcatattcactttcatcttttgagccattgtaactaccttttttactatcattgataccatatcctgtggtgttgacactattatcattccacttaaaggaatattctgcattacagtaagcgcaacatcgcctgtacctggtggcatatctataataagataatctagttctccccattcagtatcagtatacatttgatttaaaacattatttactactggacctctccatataactggttgatcttcgctttcaatcattaaattaagagaaattacctttattccttgcttagtttcaacaggaacaaatttaacatcctcgcttccctttttctgcactattaaacttcttttatcgcttattccaagtattctaggcatagatggtcctgttatgtctccatcaagaactcctaccttatatcctttttttcttaatttcacagcaagtattccagtaacagtagattttcctactccaccttttccgcttatgactcctattatattctttatattaccgtatttacaatttatacttgaacagctgctctcactgctgcagttacttttactaggacaactatcacatttactcataattttcctcctaattttataaatcttctatttaagattctcatctcatatatttaaaaatcactaggcttattttcctgtactgatatattccaatagtctttattatattttcctatcatgtaatacttcttttgctccatagtctttttattataaaatgtagctacacacttatataccttttgatcatacccttctgtattaaggtttaaagtaacatccttattactatcatcttcagtactttctataactgaaacacctgaaggaagttcttttttaaaatcctccaaatcagttgatgatataaacttcgctgcctcaacatcgttatcaatttctactcctatattactgttcttactataagtaatatatttattaatagcattcaaggccattttataatacacttgatcaaaatccacaagcgttcttgtcccatctatttcccaaaagttcttaattatatcactatcaattctattagaaactatatagcttttattgccactataaaagtttcctccagactttttatcaattcccgctacataattaaatacagcataaaccttcttatcatttttatataattggaaggtatagtctggcctcaaggatgatttgctctttgcaggctttccagtagaaagcatatcatatatttcattaattacatttgcatctgtaaccacaaacctaaaaccattgtctctagtactttgtataactatcttgcttattttcccttgtcttatatattcaaaatccttatttttaaaacctaatttaaccttaactttactaacactatcacctatactttggcaaccagtaaaagtaatcatgctaaaaatcataattgaaattaaaaaaaagcctaaaagcctcctatgcttcaactgaattccccctaattgaagttacttaatttgtatatatatttcgtttattgctgtttaaaattctaataaattacctaaataaaaaagaagaagttgtttgacttctcctattataatacttaaactgacttttatcaattaaatttacactcttttcatattttaatgtctcaactattgctttaaaaatcggctgcatactgtttttatacttatcttggtctacataaaaagcaaatcgtacaaagttctttccagtttttataaaatattcatttgcaacatagcttttttcatctttatctttaattatatatttaacaaaatagccatttcctatattcgtatttaaagtcactatgttataattttcaaccacattctgctgcatactagcctctttactgttattcaaaaatgtttttaaatccttttgtatcttccaaacctctacaaaaccatttattccagaagctttatcactaaaattattatgatataatatttcgctaccatcaaatttctctgtttcagttacccacttttccgggagcatataatttagatttatatcatttattttatattcctttagctgtcccaaattactctgtatataggcagtagatcttatcttatcattaaaattatttcctattccaaataatacgagcataagtccaaccactattattatagcccctagtttcttaccgtctactaatataaatttcatactatcacctgcgaatttcaaatatacttttgttataatttactcttaggcacggctataattgagtttttgaaatcataaaacataagccagtatccaagtgaaccctcttcttcttcaccatttacaagaggaatccatgaaacaaagcctgttctaccatcaaaaggctgttctctttttctgcgtgttcctggaacagcatatactatatacttcatattgccttctttatcatatttatatcccattaaatagtgtccatatttttggatatatggataatacatgagcattggataatatattacagtatacctattgtaactttgacaatcaagcatattttgtggatattcagctgaaactttataccatttacagttcttcacatctggaaaagcttctcctaaatcttcaagtccatcagtaagtcccctaaagaaatgtcctatctttcctcttggaaattcatcaaaatcttcttgtttatcttgattatcttcattttcgtctcttgtatcctctgtattctcgtatgagtaatatcctatttcattttgattattattatctaatctttcttctttatcttcagcctcaacctttacctcttctacatctacttcttcaacctttacctcttctaactccggcttttcttctactggatcttcttctgcttttacttctgcttttacttctgcttttacttcttcttttctagattcctctttagtttcttcttttttctttacttcaattttttctttcactacctcagtctcttttttttcttctaccctaggctctttcttatccacattagtttcttctttttctaacttcggatcttctttctttgtatttacttcttttttttcttctatctcatgattattcttttcctctatattcttcttttctttttcaatcttctcttcatacttatcaaatatatttctatttaaattctctttcttatctgttgttgattcttccttagtctcgactttcttatcctgtttttttactggtttaacttcttctcttttaacctgaggagcttcctccttcatttcaactacaggatatgatttccatgaatctgacacatcagaagcattgaatccgctcattacaacaataatgttgtcctctataaactgagaaatagatgcacctacaactctatctacagctataccgcttcctgctacatcactttcctcgaactctctgcttatttctgaccttccatattcatctatgttaattttgcctagattaattattttttttgtatccttcttattacaaaccaaaagcatattatacggtttagatacctttttcagattctgaacataaaaggatattttacatttgccattttttatttctattttagcataacctgtaggaagcttatcagaagataatccatatcccttttcattctcttgaagaattatgaaacttctactataattccttttctggctcaacttagtgtcctcccattaaatttatttaatataatatatgagaggatttttaaaaaaatgaataattatctgtatatttcgtctgacaattttccgaactcttctatagaaagtgtttctccacgccttttagaatcaatgccagctgcctcaaatgccttctctaaatcttcactggatagcttgagacctttcattgcattccacaatgtttttcttctcatattaaaagcgcttcttattacattaaaaaataatttctcatccttaacctgaactctaggcttttcaagtttatctaatcttataacaagagaatctaccttaggctgtggtataaaacatgaaggtttaacaactcttacaaccttaacatcacaataatattggacaagtaatgttagtgcaccataatcttttgtactaggctttgctgcaattctatctccaacttctttttgaatcattattgtaagagatttaaaattatatccttcattgagaagctttgatattataggtgtagttacataataaggaagattagcaactaattttacagattgctcctcacctattatgttattaaaatcaacctttaacgcatcattatgtatcagtgtaaaattatcatattctttcatctcgttagttattataggtattaaactttcatcaagctctatagcacaaacctttttggctttttctaaaagtcttcgtgtaagtgttcctacacctggtcctatttctataataaaatcatctttttgtatttctgcattttcaactatatcatccaatacagtattatcagttaaaaagttttgacctaatcttttagaaaatctaaaattatatttttcaactatttgtcttgtattaaattccttcatcataatatctcctattaactgtattaacggcatttataagttcctcttttgatatgccaaagttatttaatctagatagaaattgtgcaccatttgaataacctattccaagctcatttccaactaaatcccttctttttttagcttccgaatttccgactaatttaaagaataacatatcttcaatggtaaactcatatgtctttttctgagtttcacatttagcattattaagtgctcgtattatagattccggagaagcattttcaactcctatatctccgttctttgtaccttcactttgagatatgcgcgcatgttttatacctttaacccttttacttattatacttctaattttctctccagcaaaatctggatcggttaaaacaataactccccttcgcttctgcgcttcttttattttacttataattttagaatttataccaaaaccacctaccgcaatcatttctgcatctacagccctttttacagcagttatatcatctcttccttcaacaacaattacttccttaatcatatatgtacaagaaaaccactaccaaatatatactattttaaagttttctctttctcctttcttttttaaaatatgtaagattgaactttcctataattaattatactatagtgttttaatggcaacaattaatttatacattaacttaatagcaaaaaaattaggagcctaagctccttatttaagtatataaactgtaacattttttgctccccagtcgtaacattctctttcacttgtaaaaaacaagtccaatctgttaccctttatagctccacctgtatcctctgcaacgccataaccataaccgggaacatacaattttgtgccaagcggaataaccgtgggatctactgcaattgaactataaccatcagaatctcttttaactttcgtacctgatgctgttataccaaaactgaaatcatcagtatatgcagttgcaagcacctgaagggactttttataaagcacgcgtccacctctgtctggctttaatactcccaaagttccaaccttaaaaacttgttttgttggttctttctttataacttctcctactatctcttttgatacagcttttccatcttcataaactatctttgtgaaaacttctttttcaccagcttgcccttgctggataacctgtttttcatcatttcccatactatcatctgagataacctcagtaggaaaatcaacctgctgattctcctttgttatctgggaattaaccctggtaatcgaaattttcatattctttttgattgctgcatttcttgaaatatttaccttatccactttactaagtggaattttttccgctttaagcattttacttactgtttcctccgaagatttaactcttcgtacttttccatctaccgcaacttcaacgcttattgctttttttatatatattttgtctccatttttcaagttagtgtctaatgctggttgaatcttatcctttggtcctaccagtatgttattcttacttaaaatacttccttcattactcttataggtaataatttttgatgtttttccatcaatattaactgtaatattcttcttcattgaactaattatagtaaaaatcactgcaaccattaatatgactgccaataaagatgcggctaataccttaggaccagttgaaaagtaagttctaaattttgatttgaagttgctcttgtttaaatctaacttaagctcaaacttacttttcagcgcttctaacataataatacctccccccaaaaggcaaaagtctttaacattataacaacaattttgtaataatgtcaaattttcaagcccaagtaacctaaaatcagtatatgccatttaagcatttataagaaaattatatatataatagcgtttgatttactgattttcgtttgtgagatagtattatattattaatatatgaaaagttatactctttagaagtataacttattcattctcatataaaagttataattattcataaaattctttatgttcaactcactgttacaagtaatttatgttttaattgtacaccataattatacattaagcaactttctgacattagaagcagtttgttcttttacatttattggtaaaatgctctttatatctgctattttctctactatatactcaatatactctgatctattcctttttcctctattaggaaccggtgccatgtaaggacaatcagtctctacaagtattttatctagtggaatctctctcaccactttaactactttttttgcatttttaaaagtaactactccagtaaaaccaaggtaatatccaagttttaggcattctttagcaaactccacgcttccagaaaagcaatgaatttcacctttaacctttggaaactgctttattatatctaaagtatcaccatgagcatccctatcatgaataattacaggtaaattaagtttttctgctagttccatctgttttataaatactttcttttgaacctctctaggtggattttcatcataataataatctaatcctatctcacctattgctttaaccttgctactcttagtcaatgcttctatttcttttaatgtattttcatcaaatttatctgcatattcaggatgtataccaactgccgcataaaaaaaatcatatttttctgctagttcaacagactttagtgttccttccatagatgaaccacagtttaatactcctattactccattacttttaagttcatttataactttatctctatcctcattaaattcatcatcatcataatgtgcatgagcatcaaatatcattttaaaactctcctttattaattatttatagtaagttaatatatttcctatatagtctttttaattaaaaaccaaatttattcattatagtaagttaaatttatgagcatttcatacataagttccgtgtattttgaaatactataaaatgtagaaaacataatactttaatattatatcaccagctatatttttttctatagtaacatttaatggtataaaccagttattatggtcatgggcattcaatccgtaccaaatatcattatttaccggtaattatggttatgattttgtatccattcataataattctatttttctttatttttctgtgcatttcgttattttatagtacttaataataatttgcacaaaaacgctgaatattagtattatttagtgatatactattaagtgggtgaagtaaagtatttcatcttatattcaatttacggaggtttttttatgttaggaacagttaaatggtttaattctcagaaaggatatggtttcataactacccaagaaggtaacgatgtattcgttcactattcaggtatcaaagataatggctttaagactttagaagaaggtcaggaagttgaatttgatttaactgaaggtcaaaagggcgagcaagcagttaatgttgtaaaacattaagcctttcacataaattaaattaaaaaaataatcctcatatgaggattatttttttatcttacaatacttccagttggtatatcttctggtatatctaaagtatataatttactgtcatcgtcagttgcaacagcaagtatcattccttgtgaaagctgacccattaattttgcaggtttcaaattagctacaagaacaactttctttccaataagatcttctggtttatagaattgagaaattccagatagaacctgtctttcttctccacctagttcaaccttaagcttaagaagttttttagattttttaactggctcacattctaaaaccttaactactcttaaatccaacttatcaacatcatctatgcttatttcaggttttaaaggctgcatttttctagtagccttaagctgctcttcttttaatttattaagttcttctatttttttatcaacatctattctagggaatattacttctccctttgaaaccttagtacctgcacgagttccatcaaaagcagaaagactttcccatgtatcaagttctatattaagttgtgtctttattttctctcctgtttcaggtaagaatggagttaatgttgtcgcaacaaatcttaaactctctactaaattatataatacagtaccaagtcttgccttcttattttcatccttagcaagaacccatggagttgtttcatctatatacttatttgctctctttatgagatcccatatatgatcaagtgcttctggtattttcagtttctttatgtcttcatccaatttttcaggaagacttatagccatatcaataagttcattatcaatttcttccttatcaactggaggttgaattgaaccatcaaaatacttttcaatcatagcagcagttcttgaaaccaaatttccaagatcatttgcaagatctgaatttattttctttataaatatctcattgttaaacaaaccatctgaaccaaatggtatttcatgaagaagataatacctaacaggatccgttccaaattcatttattagtactactggatctacaacatttcctttggattttgacatttttcctccatcaaccaataaccagccgtgaccaaatacttgctttggaagtggcaagtctaaagccattaacataattggccaatatatagtatggaatcttattatatcttttcctacaaggtgtaaatcagctggccaaaatttattataaagttcatcattatcacttccataacctaaagctgttatgtagtttgaaagtgcatctatccaaacataaattacatgcttttcatcaaaagttattggaattccccaatcaaaagaggatcttgatatacataaatcttgaagacctggttttaagaaattattgagcatctcattttttctagattcaggctgtataaaatcaggatgatcttctatatattttataagtctatcagcatattttgacattttgaagaaataagcttcttcctttgtcttttctactggtcttccacaatcaggacactttccatccacaagttgagtttctgtccagaaggactcacaaggagtacagtaccagccttcataagctgatttatatatgtctccattatcatagaattttttaactattttctgaactgcttttacatgctcttcgtctgtagttcttataaacttatcatagcttatgttcatcatcttccataaatcctttattcctgcaactatttcatcaacataagcttttggagtaattcccttatcttctgctattctctgaattttttgtccatgctcatctgttcctgtaagcataaaggcatcatagccttgaagccttttgaatcttacaagcgcatctgacgcaactgttgtatatgtattacctatatgaagctttgcagatggataataaataggtgttgtaatataaaactttttcttctctgacatttaattctctccttttttaatataaaaataaaagcctctaaacaaagggttaatcctttatttagaggcgtgatttcgctttaccactctaattcactttcatctcacaatgaaaatctcaacaagtgactctaacttacagttatttatcaccctgcagtgtaacgcctgcttacgtaatatcctactattcttcaaatattaagctcaggggccatattcataaatcttggcaatgctgaatctcaccaaacatcagctctctttaaaaaccttaacttactactcttcccatcaatgcttttgaatattatgttagtacataacctaatagttgtcaagtaaaatgtactatttagtaaattcattatattattctttaccactgatgttatttttaatcataaattcttcatgtaatttcttctgactttttcctattattttacccatcatatttctcggaaggattttagaaaaaagtatccctactttattaaaacatccaggaattattactttttttccgttcataaattctttgtaagcaatttcagctacacttttagcactcatagcacctttaagctcaagttttcctgcccttttagaaaattcagtagccgtggcgcctggacataaagcagacactttgacattgaatttctttaattcttctccaatagcttcagtaaaagataaaacataagcttttgtagcataatacactgcaataaatggtcccggcatatatgaacctgtagatgccacattcaaaatcataccacttctttttttcaccatttcagctgaaacaagtctagttaaaatagttaaactttttatattaagttcaagcatttcattaattttatcaacacttgatttgtgaaataatccagtatctcccatacctgcattgttaaccaatatatcaacttcaatattattttccttaatctcattgaaaagctcattagcagaatctggccttgaaagatccttttttatcactgtaacctttgtgttaatatttttagctaattctatgagtcttttttcatctctagctgtaattacgacatcataaccatttctagcaaatatcctcgtaatttcatatcctattcctgtagaagctcctgttataagtaccgtcataaatactctccttacaataacgtataataaaatattatatcactaaaaattataattagtgtacattactaaacttccaattaaatactcataaaccataaaatatatagttatattcgtcctagaagttgttttttttgatataataattaataatgtgaattttatttatcttattttaggaggagaatataaagtgtcagaaaaaaacgagtttacatcatcaagaacagaaactgatgcttttaaggctactaaggaatttaaagaaaagtttcataataaggactcttttttttatgaaccttggcagtttgcagattacgaggtttctgcagacacactaaaaaccacatacgatgaaattaatatatggagcaaggaggaagctataatacgccctggttggaaagtagatggcaataaggttcatgtgccaaatattttttcaaaaataagtggtgtttatagtgatattgtaaaatatcgtgatgaaattaattctcttatagggcaaaaaaatgtactctttttcaaacactttccgatgttccacattacttcagaaagaaatatatctaaaatttattcatcacttctaaataataaagggaaaatagacaaagaaaaactacttggatcagaatattggaaatacagtagtttaaaaacaggcattcaagaaaacatagcagagcgaatcattgaattttgtgaacttcctgatttttggaaactaaaatgtttttccatagatattcacttttctctgcttgataaatttgctaaccttttaacatataaaaatgatacaacagccaaagaaaaacttctaatgaagatgtctatactgaatattatgcttaagcttgataaaaatcttctaaatttacttcaaaattttgattaccctctaggtgttcctaaaatagtaatttacaacaatagtaaaagtggtaatttttctttctctgatgctgtccaaataatgtttatgaattctatgggagtggatatcataatatttaatccagcgggcacaaacgatattgaaaattttataaatgaatcctatttcgatttacatagacttcagtttataaatgaaaatcttaaatacagaaaaaataatttttttatacgtattgttagaaaaatcaaagagcattttaataaatcataaaccttaaattcaagaggagatgaactttatgagatttaactttgatacagaaaatgaaaaaacacaaaatacttatgttgatgctgcaaaacttcctgaaaatacagataaggaaattgaagagaaactaaaaaaaatagacgatgaattaaaaaattcacctgaagtaattgaaatatccaaaaatattaatgttacagatattaattcaataatggagtttggaagcacccccgccgaaaaaatttcacagttttctgataagattttaaatactatgaaattagagagtgtagaaaattcaagtgttcttcttaaagaattaactgcagtaatgaataaatttgataagcaagaattagaggaaaagccaggaggatttttttcaaaaatatttaactctagtaaaaaaacaatccaaggtattttaagtaaatatcaaacctttggaactgaaatagacaggatttattccagcataagttcttataaatcagaaatacttaaaactaataaaatgctggaggaaatgtttcacgaaaactttaattattacattaatctagaaaaatactccgctgcctgtgaattaaccataagagaaatagaatgtgaagatataccttactttaaagaaaaagcacaaactggttcgcaagaggatatccttaaacttcaagaagtgcaatattctcttgaaatgttaaaacaaaggcattatgatcttgaaatggccaaaatggttgcacttcaaactgctcctcaaatcagaacaatacaaaaaggcaactacaaattaattggcaaaattcattctgcgtttataattactattcctatatttaaaaatggtcttatccaagctgtaacattgaaaagacaaaagttagtagcaaaatccatggaagctttggataacgccacaaatgagcttctcataaaaaacgctaatactataaaagagcaaagtatagatatatctaaaataactggttccccctcaataaaaatagacactcttgaagaaacctggaaaataataatggatggaataaatgaaactgaaaaaattgaagaggaaaacaagaaattgcgaactgatggaatcgataagctaggaaaactaaaaattgaatatataaaaagaataaaataatcctgcatgcatgttaatattacattgtattagcatgcatgttttatctttagttaaaaatccactaaattgtaatttcaaataaagtatcttctttggatatgtcattcttataattcttttttatctccttaacaacactcatatttgcaaccacaatgcagagaactaattctctatctttgagtaaattttcatttacaagcagcaatttatcacctactgataccttatcctcctctttgactattgaatgaaatagttcatttggaaaatctgcttcatccatatttacatgaagaagtatatctataccctcactagtttctattccaataccatgcttagttggtaatataagtttaacagttccatcaactggtgccacgatttcacttgttttaatttttacagctactccatcacccacaagcttttttgaaaacacatagtcattcacatctgaaatatcaattatttctccttctgctggagacttaaccaatatctttttttcatcacaatcctcacaaatcaattatattcctcctttttaataccatagtatattaattttatatagttgtaagttaagtttatgttcttctccctatattttttataccccttaaccaaatatgttttttattttttgttcatctaagtttaatagtacattctcttctgagaacattttgtcacctaatacattatcgaccatttttttcttttcttgttgtaatttatatattttttcttcaatggtaccacgagttataagctttataatctcaacatttttcttttgccctattctgtgagctctatctgaagcttgattttctactgctggattccaccatgggtcaaagtgcacaacaatatccgctcctgttaaattaagacctgttccacctgccttaagcgatattaagaacacttctcccttacccttattaaattcatccgcaagctgaaatctatccttcatcttagtatttccatcaagatacataacatctatatctttttcaattaacttatcttttatacttttaagaacactagtgaattgagaaaaaaccaaaattctatgcctattagctatggatgtttttatggtatccataagaacatccattttcgcattttttccattatagttttccactacagttcttggattgctgcatatctgcctaagtcttgtcaaaagtgaaaatattataaacttgctattattaattcccttttcttctatacttctatatatcttttctctagcatttttaagatatgcataatatacttctttttgtttttgagacatttcaataagtatcttatgctcaaccttagagggaagttcttttactacactttctttaagccttctcaagataaaaggttcaatatgtctatttaactcgtaaagagccctcttatccttttcctttattattggattttcatatttatttacaaactttgagtagcttaaaagatatccgggcattataaaatcaaatatagaccataactctgaaagacaattttctattggtgttcctgtaagtgcaaagcaatttttagcccttattttttttactgcttttgtaatcaacgaatttttattttttatatactgagcctcatccaaaatacaatatttaaattttattttggagtactcctctatatccattcttataagtgaataagacgttattaggacatcgtaattataatactctcctatagcttcagctctttctcttttagtccctgatattattaatgtcttgagattcttagagaatttttctatttcctctttccaattataaactatggatgtaggtactattataatactagtttctttatgccctgtacctgatgaaataaatgcaattgtctgaagggttttcccaagccccatctcatctgctaatattccccctacaccaaaatggtctaatgacttaaaccacctaaatccccttttttgataatctctcattatactattaaattcattaggaatgccaactttcatattttccaagccttttgataatttaaccattctttcaaatctagtgtctttatcaaaaaacattagattttcctcatcaatatatctattaatatatgcagcattttcttttgaaagaatggctggtttttggttaatcttcgaatagtccaaatccatatatttaaacatatcagctatcttttttataaccttattgcttaaatctacaatttctccttcttttagtttgtaatatttctttttaagtctcaatgcctcaaatatattatatagttcactgttatcaataccatcaatttcaaatgatacttcaatcatattaccttcattaacctttaaactccctttgtacatatgaggagaatacaccttgaattttttaatattttctgagtaatagatttcatatcccttactttggattttatccaatcctacagacatgaactcaaccattttatctaaagaatcatttatatatattatttcaccatccttataaaatccaaaatcctgcaatatctttattatatatacttctccatttacatccttaagctttttatcattattctcaaatttgatgtttataagcatgttctcatcaattttatccatataaactttaggttttaaataatcatagttaattacatttttgcaagctgctatgcctagttccttcaaaacaggatatacatatgacaatacatcttgtctatcttccttataatattttactactttactatttgaaaatactttaatcaaaagactataaatatttatcttatattggtctagcttgtatacctttccttgataaaatacatacttattaccgcgaactaaagatatcggctctcctccagataatgttagttttacactttcctctttttcttctatagtaagatttatctttggaaattcatcgaccactatataacaatcggttattccttcatcattaattaaaatactaaaatctctatcttctaaaattatcatcaatctacttaaacctgattctgttagatatatatttttacctaaaatgctcttttccttatcttttaccacatcttcattatcgtgatatatggcaaacaataactcaaaaagctcttcatcacgtttttttatagaatacttataaggataatatgtaaatttttctcctatttttatttgtttattttcaagaattgattttaaaaacgtagagacatctttaactacatataatctatcttccccaactctaatattaatgtagcttttttttgtggtttctgtaaaatagtgaagtttaacctctatattaattggtttgccctttatttctctctttataatactttgctttaaaccatacaaaagccttttactataatcgctttttacattgtttttaccatctatatattttataagcacagcacctacatgagagcaaatatcattattttttacattactgcaattacacttaataatatttattcctgttttgttgttaaataatatcatgcaagtataatcatttccgcttccatccataacttctgcattaatcttcacaaaattcgcatcataaaaatcattgtggttctcatttacaactatattaaaaaccttattaccattatataaatccaaagcttctttatatgttttgggcttcataagctttctaatattatctttggttatgttgaacataaactaccacctcatcatagatcaacgtatttagccttaattaatttcaaatcctcccaaaacgctgtttttttattttcatctctaaataatgcagctggatgaaaggttgccatcatataaattccctttaccttaagccattttcctctatctctagtaattctcatttgtccattcttccatattagattttcctcttctatagtattgttctgttgtaggattttattaagcgctggttccataataaacttcattgctgtggaacctaggcatactaatatcttaggctttataagtgcgaattggtttctcaagtatggcatgcacgcttcagcttcatcctcataaggtgttctatttttttctggcctacatttacacacatttgctatataataatccctatctcttgataaattgagggctgttaatcctttagtcaaaagctgtcctgctcttccgacaaatggccttccgagtctatcctcgtctgctcccggtgcttccccaacaaacatcaattttgcttcagggttcccttcgccaaaaaccatatttgttctattttctccaagtctgcacttttgacattctatacactcattatacaattctctccattgaagcattgtatcatcacctcaattttagtatatcatatagacgttctatagttaaacttaattaagttacatttacataatccactcactaacattgttgccatatagtatagacttttatttattaatatttagcaactttttaaataatattacacatacaaacatttctcgagaaatactatcaaaacatatatctttaccgataatataaatgatataattaacgtataaaggtttacactggggggtatttttatgagaaaaaattatacaatatatgcgtcaataatatttttgattacaactcttattttgtctggctgttcctcaagaagtgagggatttttagaaaaggctaacagttcaatggcaaataaacagtatactaaagcacttaactattactcttctgcaattaattctgataaatccaataccgatgctattacaggaaaagcctacgcttttattatgctaaaaagatatcctgaagcagtttcctgtgctgaaagtgcaataaaacagaataaaaatcttggaaaagcctacgcttacaaaggaattgcgctctcaagacaaggcaattatattgatgcattaaaatatttagataaggctatagaattaaaatttaaagattctaaaaccttaaacgaaagaggttatgatttaataaaaataggtagaagtgatctcgcagttgatcctttaactgaagcaataaaaatcaatccaaaatattatgatgcctacttaaacaaagcctcggcattagttaacaacaagaactatacagatgcaaagagctgcttagatgaggctcttaagttgagcaccaataaaactgatttttacaataaagaaggattactttttcagtcagcgggtctgtatgatgatgcaaaagcttgcttagataaagctatttcattatctcctaaaaatgctgtactttattacaataaaggtcttgtattaaccgatagtaataattatacagaagccattgatctatttaacaaagctatttcattaaattcaaaatactcaaatgcttatgatgcaaaaggtcttgcacttcgctcacttaataagctagaagatgctgtaaaagaatttgataatgcaataaaatacaattcttataatagtgcagcgtataatgataaagcttgtgttcttgcagataaaggcaatcttgaagatgctctaaaaagtattaataaagcaattgagataaaccctgaatcaaaagatttttacacaaacaagagctttattttaaaaagaatgggaaagacaaaagaagctgaagaatttcaaaagaaggcaaatgcattgtagcatttaggagagtgaacatgtcactctcctaaattttatatttttattatgactttagtcccttctttatcttcaacatctacaacttttaatcccttgtattcttttagtatatcaacacatctatacaaagcatcaaaatcaatcatctcgatatactttctatccttaagaggaatatttctaagaatgaatggcttttgaataaattttaaggaaaatcttataaaaaaattgggtataggtattacaaatctcatatttttatttttaatatatattctcaaagaaaccacttcctactctattacaacctctacgttatctcctttagcacttttaacatcaattatttttcctataagaccattatctatggcttcagaaataacctctaaatctatattttccattcctggggttgtttcctttattggaagtttacctaaagtcttaagaagagtttttataagttttataggtaattttatatctacattatctccatctgctgaattaacttttatcttaagcattttatccattatatcttcattatttattacttgtatttcacctttgccattacttacatcaagcgcctctattaattcctgtgccttttcagaattgattttaccatcttcaaccatctttaatattttcaacatttcttcgctcattttattctcctccattatttgtattaccttccttatttaacatttttatagcatcatcaggacttatttctcctttttcaagcatgtctattattttctttttcccaatattaactgaattttcagaatcagtattatacccaagagctcttataacctcatctaactttgttctaactgttggatatgatatatttaattccttttcaacttcctttatacttcccctacatttaagaaatacctctacgaacataagttgatcacttgttaagtactcaaactttgacattttgaagttattttctatagttgtctcacaattactgcactttagcctggtaataataagttttcttccacatacaggacatctatttataactttatatgacaaattgtcacctcatttacataaatattaatcactatctataatatagcatatatatttgatttattcaattagaaaattaatttttttaatttttttaaagtatacattaatattattaatatatatattaattttattcaaagcctcatgtgattaaatatattttttgtaacatatttctccgagagttaatatactatttatgtatgtaattcttggaggtctacaatgtattataactgtccttttaattacacaaatgattacgatgattatagctataatgatgattatgattataataactataattatgatgacctatacagaacagaaaacacacctagcacagtcaccaatatatactcttatcctcaaaatctagcaggtgcaattagattaatagaggaatcagtaggtggtgaaagagaggatgaactgttttataactatttacttagcgtggctccaaacgcagaagccaaacgtataataacaggaataagagatgatgaaagaaaacacaatgtaatgctcagacgaatctacactcaacttacaagaagaacattgccacaaggtcaagatggaactttccaaaaaccatcctcttatattgatggcataaggcaatctattattggagaaacagacgctgttaagcgttatagaactattctctttgcacttcaaaatagagttcacataaacatgttgacagaaatactttctgatgaattaaggcatgcatctctttacaatatgcttcttaatctaaacccatcaagataacctatcttaaaaaggactgttatagatataatatagcagtccttttgttcagttttcatctaatttcttagaaaattaatttataaataattttatcggcaaatttttagtgctctaatttaagttaagcctctcatttagtttcctacattttaaacttcatttaattcttatatacatgtataattaaatagatgaaaaaccagttcaacttaattttaaatctggtttacttatgtggaaaataggcatgtcttattttctttaatcacacttttggaggaataaatatgagcaaagctgatgaaaaatatttagatataatagaaaacattttagaaaatggttattatgataacaatagaacaggaattgaaacctataagcttcctcatcaaattatgcagtttgacttgtccaaagagtttccaatactcacaacaaaatttgttgcttttaaaacttctgtaaaggagcttttgtggatatataaagatcaatcaaacgatgtgagaaaacttcaaaatgagaatgttaccatatgggatgaatggatgctcgaagacggcactataggaaaagcttacggttatcaagtagctaaatttaaacaaattgacaatctaatagacaccttaaaaacggaccctcaaagtagacgaatgcttatatccttatggaatatagccgacttaaaggatatgtctcttacaccttgctgctatgaaacactgtgggatgtacaaaatggcaaactaaattgtatgctagttcaaagaagtggtgacatgcctttaggtgtaccttttaatatgtgccaatatgcagttttagtacatttaatagcccaggttactggccttaaaccaggtctctttactcatgtgataaataatgctcatatatataaaaatcaaattgaaggtatgaaaattcaacttaaaagaagagataaggcatacgaagcaccaaagctgtggataaatcctaacattaaaaatttttatgattttacagctgatgacattaaattaatagattacaaacatcacgataaaataaaaatggaggtggccgtgtaatgcttagtataatagctgcattaaatgaaaattatgtaataggaaatgaaaataagcttatatggcatatatctgatgatttaaaaaggtttaaaaaattaactacaggaaaaacaatcataatgggaagaaagaccttcgaatctcttcctggtgttctgcctaatagaaaacatattgtaataaccaaaaaccttaattactctagagaaaatgtatcaatagtacacagtatagatgaaataatagaactcaaagatactaccgaggaaaattttataataggtggaggggaaatatacagagcacttatcccgtattgcagtattctctatttaactaaagttcattctaatcaaactggagatgcttttttcccaaaatttgatgaaaatgactattcaataattgcaactgaaaaacatggagactatgactttgtaacatttaaaaggaggtaaagcatgaatataaaagaacaaattataaatttacctaaggttgaacttcactgtcacttggatggaagtttaagaccagaaactgtactcgacttgtgtttaaaagaaaacataaatataccatacgaaaatcctgaagattttaagtcctctttaaaaatttctaagaactgtagctctttaaaggaatatttagaaaaattctattttccaattagggtaatgcaaaaaaaagaaaatatatatagagttactatggaacttcttgaggattcaaaaaaagatggtattgaatataccgaaataagatttgcaccttttcagcacacggaacaagatttaaatgaaaatgatgttgtagaagcagctctagaagcattacaagatggcgaaagtaaactgggtatacactcaaatctaattctttgctctcttaggcatgatcctgtagaacgttcaatagatcttgttaatcttgctaacagctataatgagggtgtttgtgctgtggatttggctggaaacgaaagtgattttccaccagaactacataaggaagctttcgacttagcatatgataacggtattaaaataactatacatgctggagaaaccggaatagctgaaaacatattaaaatctataaaacttctccatgcagatagaataggtcatggaatttttgcctataaaagtgaagaaattttgcaatatgttatcgaaaatcaagttccactggaaatgtgtcctaaaagcaatgtagatactaaagcagtaaaaaattataaaaatcatccttttaaaaagtattttgatttaggagttaaagtaacattaaatacagataacagaaccgtatcaaacgtttcgctagttgatgaatatttaaatttagcaaatatttttgatttcgggattgaagaaattaaaaccgttataagaaatggcataagtgcatcttttgccactgaagagtttaaagttaaccttttaaaaaaattagattaaattcagaataaaaataaggagcaaatgctccttatttttattcaaatacatttattaatcttccaaatatatccttgttctctgttattttaacatcatttccaaggacgcatatataattttgttccataacatccttgagaagtttagaatatgattttatttcttcctttttcgtgcttaaaatctcatctctttctttttgtaaatcctcatatgttaatttattaaagtagtaagaatctgatttttgcccaatttgctttggtaaaagaggctgatcaattgaagatattgttcctaatatatactttgtcatttcataatcatctgcattgaaattctcaatgtatttataaacttcatcatatattttaagtgtttctgttaaatttggatctctataagatgcaaagagtatacttccatttctttgaatgtatgcagagcagccatatgctcctcccattactcttacattattccacaagtaacttaaacttattatgctttttaaaactttcatttttcctgagtaatcatacccaagccttctaaaattaaatcctttagccgcatattgaaccttactagaagtaattaatccttcattattggactgagctactttattatattcttctgatttagctggcacctcaaaactctttaacttaatctttggcaattgttctttaaacttattataaacttcatcattacctgttacacttataataacattatctttattaaatatagtatcgcatattccctttaatttgttctttacctcatcaaatttttcactaaaattctcatctaagttacatataaacttgtagaaactaattccattaagtctttcactatattccccagatggtgaaaaatatgatttaagtctaatagctgctatggaatttccactttggtttataatcatctcaagtctagatctcatttcctgaattatttccttaattcttttttcatcatcaaataaactatgatatattatctcatctattagctggaatgcatctccaaccttatccattataactttagttttgcaaacaaactttgtggtatagtccttatcatcatcctttgatgtaaaaagattattttcaaaactgatatccccagtttttatatttatctcatttgccaaatcctcatatttatacttttctgtatttacttttccaagaatattctcaagaagtccgagataaggcaagtcatcatatttaactacaccagattcaaaatacatccttaaataaagtattttatttgtaaatacattatggtataaaacctttattttatcttcttctctttcttcaagtggaagtttttctacttctttgtttacatcctttaaagaaagcataggtatctttctcaaatcctcttcagagtcttcactagtttgcctttctcttaatttcttagtatctgaaataattttatttaattcttcatcgcttagagaacttttcaaactacttaactcttcactttctttcttactttttttaacctcaactgtttttgaaggttttacaattactaaactgctgtgattagagtttattaggtaatcttcaattagcttttcaaaatagttctctgtaagagactttttaatatttttaagagcatcttcaaatcttaaattattagttggattggcatcgtaaagccagctatccattgtctttatactatatcctaatcctctaggataacttttgaaatctgcttctctaagttcgaattctcttatatttattgctgcttctattaattttttgtctataccattcttaactaaatcgttcaaggtatcaaaaactaatttcttaaattcttcttttctctcttcattagaatttttaactatcacactaaaataagtctgcattattccattgtcatagattccaaatacatcttttccaagcccagcttttataattgcctttttaagaggtgcagcctcactttcaagaagaatgtactcaagcatatcgaaagctaaatacttttcattgtcagtaggactacttacaacaaaattaagacttaaataagttttatctttttctccttcatcttgaagtattggatattcatgtgaagactcaactaactttccaataggcttttgtggttctattttagaatccacttctatcctatcataattctttagatattcttcatcgatatattttagtttttcatctatatccatatctccatataaatatatataactattgctagggctataatatttcttatgagaatccaaaaaagcatcgtatgttaaatctggtatatcatcagggtctccaccagattcaaaaccataagtattgtcagggaacaaagagttttgtatctttctcataagaactccctctggggatgaaaaagcacctttcatctcattgtaaacaacacccttataacttatgttttcatctttattatttaactcataatgccaaccttcttgctgaaatatctcttcatacttataaatatttggatgaaaaacagcgtcgagatatacatccataagattcaagaaatccttatcgttttggcttgcaaccggatacattgttttgtcactaaaagtaaatgcatttagaaatgtatttaaagatccctttagtaattcaacaaatggttccttaacagggtatttatctgatccacataaaacagaatgttcaagtatatgaaaaactcctgtactatctttaggtggtgttctaaaacttattgaaaaaaccttatttttatcttcattttgtaaatatagtagtctagctccgctttttacatgctcaaacataaaagcctttgaatttatttcatttatatcttcttcacttacaaacttaaaaccatgataaatgctatcctttttaaaacaattcactcaatatcactccttaatttaaattcaacaacgttgtgacaatatatacatattataaggtactttgcccaatctttacaagaatatttcctataattaataatttatccaaaaatcctacttaaattcttttagtttttctaatatgaatttatactctttatctaattcttctaagttatcatttttagatggtactgatatcctcccaataatattggataacctattttgtaaaatcatttttttctccttagtgtttttatcctcttcacctttgcctaacttttttacatactcactgtatgttccatcaaattgttctatcctgttattctttattgttattataaaattagcaatattatttacaaaccttctatcatgtgatacaaaaattaccgttcctgcataatccttaagtacctcttctaacgcattcatagaatacacatcaagataatttgtaggctcatctaatataagtacattatttccacttaatattatcttggcaaatgacaccttaactctttctcctccacttaactcagaaacctttttatcaacatcttcacttttaaataataatctagcaagtgtaagtcttgcaaaactctcatcgtaaatacacttttccataacattttctaatatagttttattcttcgaaattacatcaagttcttgactaaaatatcctatttgagcattttcagctgtaattatacctttattatgtgtcattatcattttaagtaacgttgttttgcctgccccattttctccaataagcgcagcctttattccatttggtatactaaactcagcattttcaaatattattttttcgccaaacctcttatttatattatttccttttataattattttagaatatatttttttagaatatataaaatctattttcgattttataacctcagctggcttttctttttcagtcatatgcttaattctggactctactgcctttcttctcttatctaaatttgcttttcctttttgacctcccatcctatgaagcctagcctcagaatttcccattcttttgggtgttttatttatagactgcgtcttatcgtgtatattattcataaccttcacaagtcttttcttttcatttacataactgatatattcaaactcttttctccttacttcaagttctttttgctttaagaacccagaaaaattactattatacaaagtttcttttccattctcaatttcaattattttattacacaccttatcaagaagctctctatcatgagataccaaaattaaagccccattaaagtcaagaagcatcttttctaatttatttgaagcagctatatcaagatttgctgtaggttcatccgccattaatatttctgcattttctttaaatgagttttttatctttaatttcgttctttctcccccgcttaaatttttctcacgctgtgaatacatatcatcaagctggcttatatatgaataagaagcttgcagctttacaactccttcttcagctttaatttttcctgatagtatattaagaagtgtagtcttacctgcaccatttacgcctaccactcctattttatctccactatatatttttaggttatttatctctaatattaatctatccttaaaatatttttttaaattattaatttctaaatacaacaaaaaaatccctcctattagtaatagctcttacataacagctatcaagagagaattagactttaatagttaatactataacaaaaaatttaggtatcaaagctaattacatactttaacctatcatcattatataaaaattattaagtttgtaatcctctctagaattttaaatacaacaaaaaaacatactaaatttatgcactttttgtttaatgattctaaaaaagattactttcgcacctgtatataccttacctttcattattttctttcttatattttatcttacataggttttaaattcaacccaatagtattattaacaatttattaatttaattgcatatttttattaatttatcaataaaaatatggactttttaaacaatgtattatataataagtattgtaatagtaattaagagaaaagaggttaataaacatgaatatagcgttttttataacaccaaaaaaacaagttgtatacgcaaaattaacttctactttaagacaggcctttgaaagaatgaaatattataaatgccacgaacttataattttaaatgataaaggtgaatatgttggttttattaccaaagaagatcttgttaaaaagataaagaattcgccaaaccttcacttaaaagattttaataaggttggcattttagatataattaaacatgtaataaataatcctataaatataaactacaacgttgaagatatctccataccaatgtgtaatactaatttcgtacctgttgcagatgataataacaaatttataggaatagttaaaaaagatgatattttaaactattcaaaatcatatgctgtttaattcatttaaatatacaataaattctttgtgaatgctgcacctttaattgataaataaattttagaattcctcaaaaatgagtatcctaagtctaccaggatactcattttgaattataaagtaacttatttttttttcatagttaaatcatctaacgttccaattttatagccctctttttcccaatgagttaaaagttcatctaatacatcagcattggtttttgaaaccgcatgtaaaagaagtactgttccattatgagttttttctaatatctttttcttagcttctgcttttcccggctgatgatcaggttcccaatctccataagcaaagctccaaaatatagtcttatatcctaacttttgagtataatatagagataattcactatatttgcccattggaggtcgaaaatatttaggcatctctttccctgtaacttttttatattcctcttcgacaccatccagctcactcttaaactttgcttcatcatatatacttggcatagatttatgatgaacactgtgattacatacatagtgcccctctttttccattctctttactatctctggacttgaggttatataaggtttaactacaaaaaaagcagcctttgccttatgcttctttaaaacatctaaaatctttggtgtatagcctctctcgtatccttcatcaaaggttagatatattaccttcttagaagaatccccaatgtaataacaattatatttaggaacatactcagaagtttcctttggaggtccttgttctgaagcctttcctttattcatataataccattcatgtggttgagttttaaatcctctatattctctattcaaaaatgtattttttattttgtctaaaagcttttgttcctctgccccatcaaatctagtgttttcttgcataacaggtacattaacagccgcaactttattcggtaatactataacgcttactaatatcacaactaaaattaagataaatctttttttcacctgtaacacttccttttcatatttattatgttcccttttttaaaatatattttaagtaaaaaaaaacactttagggctttttatcctaaagtgttttttaaaatattatttagatttctttttagactttgctacttctatatttacttttcttccatttaatttcttaccatcacaggttcttattataacatctcttagtctctctggaacatcaacaaatgtaaatttatcaaggatatcaatatctcctatctcatttccttcaacacctgatgcattatctataaactcaagaagttttttaactgttagtttatcttttcttcctgcactaaagaataatctaacactttcatcactcttaagcttatcgtcatcagaataatcaaagcccatttccttatcaaaaatcatttttactaaagctgctgatacatctactaaattaaattcatcatcaagcttttgtacaaatgggatatactttttaaaatcatctttttcgatattttttgttattttatctgtcaaagtattgtatttagtttcaaaaatatcatctattgtaggtatttcttttcttcttattttgctctttgtaaatttttcaatttgtttaatcattacatactctcttggagttactaatgaataagctataccttctgcatttgctcttccagttcttcctattctatgaacgtatgattccatatcttgaggtatatcatagtttattacatgagatacattatgaacatctattcctctagctgctacatctgtcgcaactaaaaagtcaatattattttctttaaactttttaagtgtatttattctttgattttggctcatatctccatgcataccctcaacattgtatcctctaaattgcatagattcaactagttcatctacacctctcttagttctacagaatataatggttgtttcaggttcttctacatctattatcctacatagagcttcaaatttatctttattctttacttcaaaataaaattgttgtattctttctactgttaaagaattttttattatcgctatatgtttaacttcttttttcatataattagatgctaacttctttataggtgctggcattgtagctgagaaaagcattgtttgcctatcaccgcttatattctttattatgccttctatatcatctataaatcccatatcaagcatttcgtccgcttcatctaaaaccaaaaacttaactttatctaattttactgtttttctttttatatgatccattattcttccaggagttgcaactataacatctactcctcttttaatggctctcatttgtctttctattgactgtccaccgtatattggtagtacccttactcttgcatatttagacaatcttgttaattcatcagttatttgaatggcaagttctcttgtaggagttaatataattgcctgtacgccctctttttcatcaatgtcttttattttacttattattggtgctccgaatgcaacagtctttcccgttcctgtttgagcctgacctatcatatcatatccatctataacaactggaatagcttctgcttgtattttcgatggctcctcaaaccccatgtcatctattgcttttagaacactactgttcaattttaaatcactaaattttttgttttccattaaatctttccttcctgtacttcataactttcgctctaaaaaaaagctgttgacgcatcaacagccactaaaatcaaactatagttttagtattgcccaaattaaaaattttcatgcaccagtaaaaaatataagtattttaccataaacaatattaacatacagtaaagcaataagcaacctaagtatacgtttaaatgaaaataaacctatcaaggtttgggcgaagcccattatatttattattaaactctttgttctccgtattttaaataagcttcctgtagccatgcttactcaagacatgttataatctatataaaatagctagcagaataaacttctcactgaaatatctgctaaaacatcctatataataagaaaggatttcaattatgaatttaataactttagaaaatatatcaaagagttatggagaaaaaactcttttaaataaaatttcactcagcataagtgaaggcgaaaaaataggtctcataggtatcaatggtacaggtaaatcaacactcctcaaaattttatgtggaattcaggagtatgacagtggaaatataataacctcaaatagcttgtctatgagttatctttctcaaaacgaaaacttctacgacaatgccacagtactagaacaaatttttcaaggaaattctaaagaaatgaatcttcttagagaatatgagactgctcttgaaaattccgctatgcatcctgatgacgaaaaagttcaaaaaacacttcttaatttaactgagcaaatggatgcactagatttatggaatatagagagtaatgctaagacgatactcactaaattaggtataaaaaatttcaatgctaaaataaaaaccttatcaggtggtcaaaagaaacgtatttgtcttgctcaaactcttataactccttcaaaccttttagttttagatgagcctacaaatcatctagataatgaaacaatagaatggcttgaacagtacctaacttcaacaaaaagttctgtatttatgataactcatgatagatactttcttgacagaatttcaaataaaatctttgagctgtataacggaaatctttattcctacgttggtaactacagcgtttatcttgaaaaaaagctagaaagagagcaacttgaaatatcttcaaagcaaaaaaaggataatttattaagaagagagcttgcttggattaggcgaggtgcaaaagctagatcaacaaaacaaaaagccagaattcaaagatttgatgagttaaatagtcaagatgacactataattcaagataaaattgaaatttcaacttctggttctagattaggaaaaaaagtaattgaaattaaaaatcttaacaaatcctttaatggcaccgaattcataaaaaattttagtttcattttctcaaaaggagatagaattggtattgtaggacataatggtatcgggaagtctacccttttaaacattatatgcggcaaaacatcacctgatagtggaacaattgatttaggtgcaacagttaaaataggttatttttctcaagattcttcaaatatgaatgaaaatttacgtgttattgactatataaaagaaggcgctgaattcataagagattcaaataacgagctcataagcgcgtcaaaaatgcttgaaaaatttttgttttcctcagaaatgcagtggacacctatattaaagttatctggaggagaaagaagaaggttatatcttcttagaattttaatggaagctccaaatgtacttattttagatgaacctaccaacgacttagatatacaaacactaactatactagaagattatctccaatattttgaaggtactatactaacagtatcacatgacagatacttccttgataagcttgcgaacaaacttttaatatttaagggaaacggcgttattgattataatactggaaactattctgactaccttgagaaatcaaaatctgaagaaaagttagaaatggctaatacacctactaaaaataaagtaaaatcagaaaaacccaaatctacaaagcttaagttttcttttaaagaacaaatggaatatgaaaaaatagattccgtaattgaagctgctgaaaacgaattaacttcaattgaagctaaaattaattccgctggaagcgattatatgcttctagaagatcttatgcctcaaaagaaagagctagaggaaaaacttcaaactttatatgatagatgggaatatttaaatgaattagctgaaaggattaaaaacagctaacaactaaaaagctgaattgatacgcatacccttaatcaattcagctttttagtattttaaaatgaattcaatagccaaaataaaaaatttcatatataaaattcctattttacctctatgtattttggtttattttttcatagtaatattcagcaatttctttataggtttctagagccttgtaacccatatcatttagtttatatattcctctaccaaccctatcaaaccacccataatgattgacatataatatagaagatgtctttttctcatctgtacctaacttttttaaagaagctggtgacatagacccaaactctttaaggcagcacgcaataaaaatagcttgctctctatatgccgttataagctttttatgtacgcttccgccaacattgaaatttttatgtctattttttatttcatttattattttgtccctcttttttttgttcatacttacgattttcttcctatcaaaagcttctggctctatcgctatttcaagaattcctttattgcctacaaacgaaacccatattaaacctaattcaagccttcttattaaatgatatatatcccttaagctagaattcattttcatcttcttaggtttcagaacagcaatatacacaagatctgcggtcttttgcctttttacagcttgcgaaagtaactttacagttaaattctttttaagttcaataacaattaatatatcttccttaatagcagttacatcacaatcctcaacttcatttctaaccacatacccatcgtttgtaaaaaaatcttcaatgggtttactcatatctgattctgttctatctttagcagccatattttccccctaaattatcttataatatataataatacacgaggttttaaagttagtctaattatataaataaaaggtacaaaaaaagctaatttaacttttcttgtacctaacttacttaaaaattaatcctctcttaatatattaacatccttacctgccataaccttattcatatttctaactgaacacattttaccacacatagtgcaagtatcaggatcttcaggcgtagactcttttctatatcttatagccttttcaggatctattgataaatcaaacatagccttccaatctaatttttgtctagcttctgccattttattatcccaatctctagctccctttacatttttagcaatatcagcagcatgtgcagcaatttttgacgctacaataccttccttcatatcctcaatattaggaagcctcaaatgttctgctggggttacatagcacaagaaatctgctccactagcagcagcaacagctcctcctatagcactagttatatggtcatatcccggtgctatatcagtaacaataggtcctaacacataaaatggtgctccatggcatagctttttttcaataatcatattagattgtatttcatttaatgccatatgtcctggaccttcaaccataacctgcacatttctatcccatgctctttttgtaagttctcctaatttaataagttctgttatttgacttgcatctgtagaatcatctatacagcccggtctacatgcatcgccaagacttattgttacatcatatttttcacatatatcaagtattttatcatagtattcataaaacggattctctttattatttaactccatccaagcatataaaagagagcctcctcttgaaactatgttcatagcccttttatttcttttaaaagtttcagcagtttctctatttattccagcgtgaatagtcataaagtcaacgccctctttagcttgtttttcaacaacacctatcatttcttctgctgttatatcctttaattccttatcataaaatccaatagcatcatatatgggcacagttccaatcatagcttttgacatattaattaatttttttctaaattcctccgtcttaccaaaagaacttaaatccataattgcttctgctttcatagctattgctatttcaacttttttcatctccatatctacattttgacaatccttagatatacctaaatttacatttatttttgtcttaagtccttgtccaacaccttctgcacttaatgacttatggtttttattagctggtattactatcttaccttctgccattagcatttttaattcactgatttccatttgttctttttctgcaacaacctccatttccttagttgtcacattttttttcgctgcatccatttgcgttgtgtaatccataatatactctcctttaattttatattaggattcagttgcatcataaaaataaaaaaagctcgccaaaagggcaagcttactaaacttctataatatacaatgcactgcttccctacggtagtattaactacatcaagttcaaagggttggatttctcctctcagcctaaagtcttttattagttaaatatttttaatgatatcaactataaaagccttaaaaggcacccctagctaaaatatatttaattttccttaattatatcactttacactcctatgcatcaagtacttatttatcactcattaaaatatgaataacaaaagaaattattaagaaattttaaagtgatttttaatgtttatggtatataatagaatttgtatggaaataaatgattaacagttgtatttaattatgcaatatttctataaaccaattaactattcaaaggagacttatttatgcatacaatcaacatgttatcttcagcagaaaaagttaaaggtcaaggtgttatgtcagcctatcttgaacaggttaatttagttaaaaccgaacttaattcaagtttccgaacttatataaataaatttaagttttgcgatataacccactatcacactatagacttcaaattttttcttagtataccgcttttcaaacttaaaggtactacagtagcatacgttcactttgtacctgaaaccattgaaaatagtcttaagcttccctttataatcaagaaaattttttataaatacataatttggttttacaaaagtgttgattatttggtagttgtaaacccatattttatagatgtcttatcaaattacggtatagataaatcaagggttacttatataccaaacttcgtatcagaagataatttttataaatacgatgaagaaaaaagagtcaccttaaaaaaatcttttggcgttgaaacaagtaaatttatagttttaggtgttggccaggtacaaactagaaaaggagttttagattttatagaaaccgcaaaaaagcttcctgatattcaattcatatgggcaggtggtttttcctttggtagtataactgaaggttatgaagaattaaaaaagatagtaaaaaatcctcctgctaatgtgaaatttttaggaattatagatagagacaaaatgaattctctttataatattgcagatttaatgtttttaccttcttataatgaattatttccaatgtcaatattagaagcactttcattaaaattaccagttcttttacgcgatatagacatatataacgctatattattcgattactatttaaaaggaaatagtgtcaatgattttgctaatataataagaaatcttaaaaatgataatactatctataataagtggtctgaaaactcagcgcgctgtcacaatttttattctaaagaacatgttttaaaacaatgggaatcattttactataagatatcctataaaaaaataaaatccaggagtaataatattaatgggaaacaaaatatttaatttaatcgtagtagtattatgcgcttgcatatttttatctttctttctatttaacaaaaattcagcatccttagtttcaattatatcaagcttaaatatttattggataatcatagctttgttttttatggttatattttggatacttgaatctataatacttcatattataactataataattcataaatctaaacacctatttactaaatccataaagttcgctatgataggtcaattttggggatcaattactccttttgcatctggtagtcaaccagctcaattctatgctatgacagaatacggaattcctggagctagtgcaagctcaatactaatgataaaatttatagttcaccaaacggtattcacaatatattctatactggttgtactatttaaatttaattattttaagaacaatataaaatatttcacatacttttgggttgcaggttttacctttaatactttaattattgtagttgcatgctctttcttaataaaccacaagttaactgaaaaattgctttatgttataacacactttttaggcaaaattagaattctaaagaatccagaaaaaagatttgaaaaaataaaagctggcttggttaattttcataaaaattcatcgataatatggaataacaaaatagtgtgttttaatgcttgtattttaacctttattcaatggacaatatattactcaattccctattgtgtctatagaagctttgggttcagttcagcaagtattttcactatgatatcagctcaagtttttttaacaataattatgtcttgtatacctcttcctggtggtgaaggtggtgctgaaggaggctttttcttaatatttggtttattttttcctagaaaaattattctatcagccatactaatttggagaatactttcttattattcttgtattctttccgggagtttgttttcaatgatatcctctaaaaaaccaataaaaaaataaaatacactatttatctacaaaaaatattcaaagatttaacaaaatactattctaatatatatatattatgagttataatgtttaaggaagaaggtgagtaactggttaatctacaattataatttttaactctgcaactatgcaccttgtaattattttgtatgaattaaaacaactgtaaactaatatattaatatgtagtttttattaatggtaattataatattttagagggtgaatttcttgaataatgaaaaacaaaaaaagagaagaaaacttttgattatgaggtctataatagtattctcaattgtaataatatgctggacatctttttttatctttgggacatactatcgtaaaaaaaacgtagcaacggcccatacagctcataaaaagagtatgctggcgaaatcaaaaaatcacgataagaaaaaagacaagcaagcaaaacaaacttcaacaatagtaccaggagattttcaaccatggctaattaagagaacagacaataaaaaagtagcctacttaacttttgacgacggaccatcaaacaatacaaaaaagatattgagtatattagatgcaaatcaaattaaagctacattttttctaattggtcaaaatgcagaaagatatcctgatttggttaaagatgaggctaatgatggacattctataggtaatcatacatattctcatatgatatcttatagagagactccacaacagtttttagatgatattaatcattgcgattctgtcctaaaatcaattttaggtgatagatatacgcctaaattaattagatttcctggaggttcttttggaaataggctaaaaccttttaaagatgcagtaacctctgccggctttagatttgtagattggaatgatatgaatggtgatgcggaacacccttatgtctcaactcaacaattaatacaaaatattaagagatacactggaaatcaacaaacggtagtaattctaatgcatgatgctcctgcaaaaacgactactgttgaagcattgccaactataattgattatttgaaaagcctaggctattcattcgataaaataacataaattattcatacaccataagtgtatgaataatttactttctatactacttcaagcttatttaaattttatcatacggtgataaaatatatataataaaaagataaaatatttataaagtttatccgtattatatttttttttctacttatactatatatagaatttcaagtcaaataatgaaaggaagtatattattatgagtgttaaaaatgcaatgacagccgactttttacgttcagcctacggtggagagagtatggcacatatgaggtacttaatttggggagaagaagctgaaaattctaattatccaaacataggtagattatttaaggcaattgcctactcagaacatattcatgcaaaaaaccattttaatgttttaaaggaagacttatatgattcctctgtagttgctggtgctgtattcggaagtacaaatttaatagataatcttcaaggtgcaataaatggagaattacatgaaataaaacaaatgtatcctgtatatttagaaactgctagatatcaagaagaaaaagaagctgaaagaacctttcactatgctttagaagctgaaaaaattcatgcaaaactatttcaagatgctcaagattctgctaaagagaataaagatattaatataggaaaagtttatatttgtcctgtttgtggttttacaactcttgatgagaatatagaacaatgtcctatttgcggcgttaaaaaggataaatttcaagctttctagggggtacactttctccttacctaaaaagggtgttgcagtactattacaacaccctttagtatattctcactaaattttaaaatttctaaaaaaatccataacactatttgaatcaactggcttgctaaaaataaatccttgtattttactacaattcatactgttcaaacacttaagttgttctctatactctacaccctctgctattatatcaatatccaaatctcttgcaagattgattatgttccttgtaacaataagattgcggttagaactataaagcttatcaacaaaagatttatcaagctttatgccatctaaaggtatattatataaataatttagtgatgagtacatagtcccaaagtcatcaatgtatattcttatacctaactctcttaattgatttaagacacaaagaaccttttcacttaaggctgttctttcaattatttcaaatataatatttctagaattcacaccttcattttctacggtttctttaacaaaacttacaaaagactcttcacaaagctgactttctgctatattaatagacatactcaacttttcatatcccatatcattaaatcttctaagttccgccaaagcttcttttataacaaactttccaattgaatttatcatgccatttctttcaaccatagctataaaataattaggccctaatattcccttttgtggatgacgccatcttaaaagagcttctaagccataaatatccttattattagtatctacctgaggctgataatatagttcaaactctttattttgcaaagcatgacttatatcatgaagtattctctcatctttaaataacttttcacaagatttatagtcaaaaacttcatagcaacttttttcagaattcttagcaatacttaaagcaacttctgcacagcttaaaacactctctacattatcgccattatatggatataatgaaacacccatatttatatcaaccctaaaacttgtatgatatttaattgcatatgaatgaaaaaactcaactatactttgtgccataatcttgaattctcttctttccttaaaaggaaatagaacaacaaatttgtctccccttatccttgttgcttgacaactatcttccaagttattttttaaattaatagaaatctcccttagtaacctatctccattttcatatccatatttgtaattataaactctaaacttagatatatctatgagatacagtgcgaatttattgtcactaagtagtaatttatcttttttacatttttcagtaaaatttattatatccctccacataaaatcactgctttcataccctttattattatgtaggaaaaccaagaaaaatcttaagttatgcacatttcataaagctaactttcaaaacataatgctatgtacttcacttaatattttcactaattttcctatgtttagcataaatttaaaatttaaatattacattttatttactaattatatcatagtataacttaaaccacaaatattaatatatgttttttatttacattataatccttattaaaatatgccaaattcgatataattatttatattaatacctatttttctttctgtggatggttttatcaaattgtttttttgatattccttattttcttttagtataataagaatttattctaatatagtcttctgtaaaatctgatccccaaacagttgcagcaaaatcacctacatttaaattagcctgtattttacattcattattatccctaagatatctttcgatacaatcaaagttttcttcatatatttttcccttatcatatataacattagaattgaaggctatttctattttcaaaggatctacatcatcctcaaatgattttcctatggccatagctatccttccccaatttggatcagagccataaatcgcaattttaacaagcggtgagtttataattgatttagctattactttagcactctcaaagctactacagcccattactgtagcttctataagcttagaaactccctccccatctctaactatatctttagccatatcaatgcacatatctgtaaaagttttctcaaaaacctccaaattaacatttccaacatatccatttgcaaggattgccgctgtgtcacttgtacttgtatcatggtctatacttatcatattaaaagatttgtccactgctctttttaaaatccctttaagttctacagctttaatagaagcatccgtaaaaaaatatgcaagcatagtagccatattaggttcaatcatcccagatccctttgcaattcctaatacagttgcgtctccaatcttacaactttttattttaagttctttatcagttgtcataattgccctattaaattcttcccaattatatttacttaaagaagactttattccatttatcccagtaataatacaatctataggcagttgtttacctattattcctgtagatgaaggaagtatattttcactttttatatttagttcacaagacagcttatttaatattctataggtatttttaagcccttcttctcctgttgctacatttgcaacaccactggtaacaacaatagactgaagcttattatccttaatattttctttgccaacaataattggaatcccacagaacttattttttgtaaaaactgcagctgcactgcacaatttttctgaatatacaacacctaaatctaattttcttttttttattccaacatgcttaccgcagcataaaaacccttttggaatcatataattaatcatatatactacatctccttaaacactatgtgcatgtaatatattatatagccgtttttataattattcaatataatttatatttatgcatttataataaaaaacaaagctcttcctacataacacatattttaataaaaactatgtatttacataagaaaagcttatactatactatttctttcttatcatgcatcgggtccttttctgcatattcttccggaagatggctgacatcattaattgttactattttaggtatattattttcattaaattctattttgcatatagatgtattgcctaataaaattctatgatacattgccatattccagttaaaaagagctataagcgctgcttttattatccctccatgagcaactactacaatgtttttacctttattgtcatttacaatttttaatacagcatgttcaactcttattgaagctctttttatacttaaatctcctccacacaaaggtccatcctcagtatcatttctccaaatgtcaaattccttcggaaacttacttttcatttccttaatggttaaaccttcccaaagtccaaaatttatttctcttaagtcgtcttctattattggactaatccctttagtcgaagcaattaatttagcagtattaaaggctctcttcaatggacttgcataaacacaatcaaaacttccttctaatcgctttgcaactctcttagcttgttcaattccgttatctgtaaggtttatatcatggcatccctgaaaccttccctgaacattccattcagtctctccatgtctaaccagcaaaaccgttgttttcataatcaccacatccttttatgtggctattatacaaccccttaaagaagctgtcaaacctagaatttcttaaaagaactttcaccgaagcaagtacaaaatataacaggttttaggtttatattgtacttgcttcggtgatttagttctttttagaaattctatctctcttcatccttcatgcactcttttaactacaaaatataatttcgctctctttctatataaatcaaggatagtcagatacacttcttaaaccactctataactgcctctgcctgctcctttgtatgaaaatcatgttcactatcaactgacacagttagatcactcttgaatctttttgcaaaagtatctataacataagagctttgcaaattatcttttgttccataaataattgcagttggtacacaccatttatcaattgggtgatctttcacataacagtagtaatcccatgaaagaatttctactggcgtacttatttcctttttttctctaagtaattcttctgttacattgaaccatttgaacatctttcctataagatgttccatatcaacaattggtgactgaaataagcatttatttatggaaaagtttttatatgcaagcaaactaaaatatgcaccgagactgcatccaaataaacttatgcttttccagtttcttttggcatagtctccaatcactttaaggtcatgtacaccattccaaacattgcatttataatcttcattttttctctcgccatgttctggaagatcaaaactaagaacttgatatcctctttctactgctattgtcgcaaattcatgtgcactttccttacttgacatttttccatgaacaaatatgtatactttatccgaagtttctccccacaaaatagccggaatattttttatttttattttattcataataaccctcttacataaaaagtttatattgccttttactgtataaggcagtatattatattataatatcactttggagggaagatgttaataatgggatttttaaagaataagaaagttgttatatctttaattattattatatgtttgctatttttatcaattataagctatttgagctttaaatatgtaaaagcagcgaataataatcatactaatttaactaatataaaaaatatatcacaagatattgaaggtataatgtacactgacaatacttctggtaacacctacaatgtaaagttttattatttggatggcagggacattagaaatataaaaccaaaatcatcaaagtgtagtataagaattttatctaaagttaaaacaggagatttaaacttaaaattgaagaaaaataataatattattatttttgataagactatttctaacaaaagcgtaaattcaaacataaccttaaatgtaactggagttgatagtaatggatttaatattgaagttacagctaaaaaagctcataacggcattgtgtatatagaatttaactaatataaaaaatagtgctgcaaatagttctttataagacttgcctacagcactatttttatttatgattttttaaaacttcttctattctttgagctattgccttatagccagagctatttggatggaaattatctatagtaagatacttctctgtatcatattcaaataaatcataggtaggaataaagacagcatttgaatcaaccgaaattatattttgtgtttgataattccaggagttaagcaactctattttatcggtccctatagaacttccaaatggattatatagacctataaatacaatggtacacttagaattattatctcttatcagcctaaatatatctctaacattattcaaatatttattctctgtgtcttttaaatcagctgccgaaacattcccttcaaatttaaatttacttacctcattacctccaatagatatgaatatcatattggatttttttatcaaattttcagtatctttattcttaactatttgaagaagtccgtttgatacatcaccattaacagctatattatccaacctaacatttctattatttttcaccctaaaataatctgcaaaatatccactaaagcctttacctttctcatcacctgtaccctttgccagtgaatctcccattacaagtatattgtacgaattggagacagtatcataattattctttttactaactaccgtctctttactactcttacttatatacttgtccacaggagatgatgttaaacttgccgcttctttaattccaaaaatagataatagcaaaactatacctgccgcaataacaacaaaccctatagtcaatttttttagcatttcttcacccctctaaacaagtacatcctttttattaaatacataaaaacttattacaatggaagccatactccaaattaataaaaccattatagaaaaatcaaaattcattcctgacactatcctcattttacccgtaagatactgtggtaaatttagattcactacaaaaaagtactttgcagcttctatatcatctaaaaatacgcttaaaatgtttcctcctattaatgctgacatcattattcctattgatgctccaatactttttacgaaaatggatatcataaaagatattgaacccacaactattgatataaagaaacttaaagcagacataattaatatataataccactggtatatcccaaccacattagaagcatcaacctttcccgctattaccttatatcctgttataactggttctccaaagccagtacgcttaaaaacaactaaagaaactattagcggtattattgttgtcaaaaatactacaaaggctgacattataatgagagctatatatttactcaagagtattttccaccttggaacggctcttgtcaatagaacttttattgttctactagaaaattctgacgaaacaatatctgaagctaatattattacgagaagtggtaataacaaagtaactgactgcgccattatatttgaggtaaaatttcctgctgtgggtgttattgggtttatgttatttttaagataatacctgtactgttccatttgaatatttatacttttttcttctgatttttttacagttctatattttaacttactctgtaggtcttgaatttgctgatttataagaggtctccaattataacttgaactattgctgttaacatagcttctcactgttctttgatacttattattttgtccgtatgcaaaagcacaggcttctattaaaataatcgccataatcaaaattactttctttttaaacagcatttttattatttcatttttaattaactttatcacctttccaccacccttcatttatcttcagtaatatttaaaaataaatcctcaagatttctctgcttactgctggcaaattttatttttattccattacttaaaaaagaatcatttatacttataagcttttcttcatccaccgaagcctcaagcttactgccattaatcctactatcaatcctccaactattttttaatacttctctacccttctcattatcattaagctcccaaaacacttccttagtttttaaaagttctgcaactgaagcatttttaagaatttctccatccttaattatagataccttatcgcatataagttcaatttcagcaattaaatgacttgaaataagaacagatatcttttcctccttagataacctttgtatcaaatttctaagatcatttatacctgcaggatcaagtccatttgttggctcatctagaataagaagttttggtcttttcataagggcctgtgcaatgcccattctttgcttcatcccaagagaatatgttgaaatcttatctttaatactcttctccatattaactaaattaactgcatattctatatcttcattagtaacatttttgtccatagctgcaagcatttctagattgtcttctccactcatatactcgtataagtctggtccttctactatacaacctacactttccatagccttcacataattatgtaaaatggaataaccacaaatctcaattttacccgaacttggttttgaaagtccaacaatcattctaagtgttgtggattttcctgatccattgggtcctaaaaaccctaaaacctcaccttcatctatagaaaaatttataccctttataatttccctacctcgtattactttatgcacatcttcaacaagtaaaattcttttattcataaaacaccttctcccgtttaattcataaagtcaatttttatattaactatttctccttttgttccaattcttataggcggaccccacgtaccatatcctgatgttacaatcaaattaaaatccttcttctttaaatatccgtaatcatcttcaaatactaattttgtggtgaaattaaacggaaaaatttgtccttcatgagtgtgtcctgaaagctgtaaatccacgccgtttttttcagcctcttctaatgcaactggcctatgattcaatgctataataggcaaccttttatccgcatttttcataatttcatttaaaggttttacctttccaccagctgcatcatttcttccaatcacataaaaactattatcaaccttaactgccttatcttctaaaaccttaatgtccgcctttttcatatagttcattgccacttcagaattttgggttgcatactcatggtttccagtaatagcatacactccatactttgatattatttccttaaaagcgctgctgtaatacttttcaagagaggttggagtactttcatctaccatatctccacagaaaaaaaccacatcaggcttaagcttattgattgaagtaacaagtttgtcaattccacgttctctaatcattatacccatatgtacatcagaaaccataacaacatttaactgcttaagttttcccgctttcttatttatacttatattataatttgttgttgtttgatgaattgcatgccaaaatccgaataaaattataattataactgcaataaaaattgaaattcctctaccataaattatactcatatattctcttaaagaaccactaaatccaagtttatttaaaataaatcttattaaatctgttatgggaaagataattattagatagcaaaataaagctaatgagatagcccctaaataggttaaaattcctgtaattttattatttattgatatagtactccttgacgcaacacttagtatgaaagaaaatgctaaaaaccaaaatatcccccaataagctaccgctttcaacccttcttttttgcgaagattaacaccaaaaattattccctttccttttgctcctatataataccaaagcattgtatatataaataaaattaatataaccaatatgatatttccaattactattaatgttgatttcacttcctatcattctccttctcaccaaagtaaagcatagctaatttattactaaatagcctaacattaattttttgaattttaccttttaactatacatctatatatctttctttccaaacaattttttttaatggttttctaaacatatcaatcactataataattacaatcaaaacacttgatataagtctaccttatgaatttgtttaccagaaaagccaagtattaatgggtaagtgttatcaaatccatgaactaaaattgctattaataaacttcctcctgttttgttatataaccatgtcatttccaaggataaaattacagttactaaaatatattcaacaattgagttatatcctgtattcggtaaaaaaaacataggtaaatgccacaatgaccatattactcctattactactgctgaaaaaaccgggtgaaacctactttgaagcctaggaagtaaaaaacctctccaaccaagtttttcttctaaaggtccccaaaataaaactattgccaagaataaagtcataatacctaaaatactactagttttaaatccactagcctgcatattcattgctacttcaactttcattcctaataatttacaagcaaactctacaatacgtatttgtgcatttaaagaaaatactgccgctatataaaacaatatattaaccttccatttagttaagctttgcaataatttctttatctccttctttccataaaagtatgctgtaagaaatattcctataatactcggcattgcagctcctaatatccttaaaaatgtataatatgtattatttaaatatatatatttattcaaaatacctttagatgatgataataaaattccccacaatatatacgtacctaagaaggtcataattaaaaacaattttacttgatgtgtttttaatttgttttttaatctatacattaatatcacttctctccaactgaaatgtctatttctttaaatacaattataccaaaacatatataataaaaaagttatctctgccatatttagactgagacaactttttttaattttacctttattaaattcttacagcatccaaatgaagttctaaagcctttttgattcctaacttttcaataatactaattatattttcagcaacagcctctgttaatccttcaaccttatttaaatccattttccatatagccttgtacgctaaaactgactcaaacaaattccttatgccttccctactacaatcacagttatcccatgattttttataaaactctaaaacatgttcatcctctgataattttatttcttcactgcctctttttcctttatagaaatacattaaagccgccaatgaaaaaactagtctatgaggaaactcccctttaatttttatgtactctaacaatgaaggtaaatttctagtctcaaactttgacatagaatttaaagctatactaattaagtaatgatgtataaaaggatttctaaatctctcaacaatagaatctgcataaagtactaattcctcttctggaatatcatcattgactaaagtaggaattatttcttcatatattacttcctttataaaggttccaacaacttcatgatcaatagcttctctaacagtttctaatccataaagataagctactggaacaagtgctgtatgtgctccatttagtattcttacttttcttgttctgtacggtgcaacatcattaaccaactttacatttaattgagcttcttctactggaagttcatcctgaagaaagctcgggccctctaattacccataaataatattgttcgcttacgaccaccattttgtcatcataacctatttctagactgtctaaaacaaaagttatcgaggataaacattataactcgataactttatataaatttaaattatattttctcatggagtaatttaaagtaatctaggctccattaattttttttgatataaaatcctttaatgaatagaattttttcaaagccttccatccacgtgatctataaatcttcttcagctcttttttataatacatatgcttactttcttcatccttaagtctaaaatttattcccttaatctctttcttgtaagcttctaattcataggttaatttacttaaatttatttgtagaattccattttgaagatttaactgcgttatttcatcactctcggtacactctttactcagtatgtatgtactattgttaggcacaatttgttttatattttctacatgttcttctaatatttttttatctttaacaatcaaattagagtagtccaaaggattatttattactttttctgttaaacctattatttcttttaaattgctaaacaaatatccctgaagtcctctatcttctagaaaaaatctagatttttcttgttccatcaatataaacggtacattatgtatgtatgaaaatatagaaccgtgcagcgaacaagttataagataatctaatttccctataaaagtgaatatttcaagaggtttcattataggaagtactctagaattagaaattctttgactcaatttactcatatagatatagtcgtaattatagtgcgttataggaataaaatatattgtatatggaagcttagatgcccactttacaaataagccttcttcttccttggaaaaaatattaggaataagatgtacccctatagctggtctttttatatgaatagggaaatcttgtaaatcatctaaaagcattgtggtacacggaactacactactttttttattaaggtagccagctttttttctatctccttcacttctaaaagttacatatttgtattcctcaaggtattgaagatcattaggatttccaactacaccaacagaattcaatatattgggtcctctcaatttaaacttatcgtaaaaaaagtcactattctctcttaataaatgtcctcctcctataatcacagtattgtactttaatacatcaatattattgagaagaatttcatcaaaatcaacttttagttccttcattatttttctaagacttataccaattgctacatcaccagtattcccgcttatgttatcgtacattataccaactttattcttcaaaaagtacaccccttaaaatacgcataaaatatgtttacactgctaattttatttgttaaattccagtatactcctcaataattaatacgctataaactaattataaattttctataagttttagttattaataattatacctactttaaataaaaaaatacacttaccctttaggtacagtgtattttttattactttacgcaatgcactctttaattttatccataaattcgctcatttccttatcagttcctatactaactcttaagaaattatcaatccttgcagttttaaagtatcttactaatatgcctctttttctaagttcgttaaatatactttcagcagaaattgttgtatggcttataaaaataaaattagcctttgactctataaccttaaaaccaatctgctttaattcagttgacactctttcccttgttgctataatttttcgtctcgcatcctcaaagtattctttatctttaaaagcagcttctgctccaacaatagctagcctatctaatgtatatgaatttatagaattttttactctggataagccctctataagctcaggactccccatagcaaatccaattctaagtcctgcaagcgatcttgactttgatagagtttgaacaattaaaagatttttataatcctttataaacttaactgctgattctccaccaaaatcaatataagcctcatctataataactacagaatctttgttccaatccaatatcttttttatatcactaagtccaatatactttgctgtaggtgcattaggattaggaataattacacctccattacacctacaaaaattatctaaatctaaagaaaaatcctcttttaaaggaataagctcacaatttaaattaagtaaattggcatataccttataaaaactatatgttatatctgcaaaaaatacagttttccttggactaaaaaatgtcataaaggaaaacgctaaaacctcatcagaaccattaccaacaaatacctctttatctgatataccatagtattcagcaatagttcttttaagtgaatcacaattaggatccggataaagtttaagcttataatcagcctctttttttattgcttctataaccataggtgacggaggatatggattttcatttgtatttaattttatatatttttgatcctttggctgttctcctggaacatatggctctagtttctttacacgttcattccaaaacttactcattttttcacctctacccactaaaatttcattaaaataaaactacataaattttcaaattatacatgcatcctaacttaaccttcattctgatacatgtataatttgaactttgttatataaatatactatatcacaaaactttagcgtattaaagtgttaaattgtaagttttctattctccaatagttatggagtatgtacattcaaactcttttcctacctcaagtttcaatccatcctctttttctctaaaatctccattgaaatcttcataatctgcatgaccaaaccatggttctatacaaacaaaaggtgctccttctggcttagaccataatccaacataaggaaagccctcaaaggatacagttacactagtggtatttttatcattttttagagatatgctagtagaatctaaatcctttaatattaacgctccttgtttaaacaatttttcacttaaattcaaaatattagatgcatataaaaacggtgaggtattcctggatagtaagttgctgctgtttagtttaactactcctgtagtctctcttttctcaaattcaatataatagtcttcaaattgtaattcgtcattctccgattgtttccctataacaggacaattaaagcctggatgtgcccctattgaaaagaatatatccttgtcatctacatttttaacattgtatgttacatcaacagtactatcttttaacacgtatataactcttagttcaaatttgtaaggatacttctccaaggtttcatcattccatacaagtttgaatactgctctatcactagcattgtcttccacttcaaattccatatctctagcaaaaccgtgctgagaaagattgtatactttatctgctatcctatacttattatccttaacctttccaactataggaaatagaataggagcgtgccttccccagtaacttgaattagcagtccaaatatattcattatcagtgtttttactctttaagcttgtaagttctgccccactttctgataactctgccttaaaattttcattttctaaccttacacacattattaccactccttaattattatcatcttaagcataaataaaaaaactcctacacatatattttatcatttaattgtattatataacagttttttaattataatttacttcagcttccaaaatcttgctccagattttacataaattgattaatgtgttatcataaagaaagttatatttacactgagggggaaagcaattgaataagagagtttttttatctgttattacaatgctggctataatcattactttcaacaataatgttggtaatgctttagctgcacaaccatctaataacgacgatgcgttaaaacaaacgcaggaagacaaaaaaaacatacagaacaaaattcaagacttagacggtaagattcaagatgtacttaaaaaagttgataacaacaaaaaagatatgaacaagttaaatactgatatggaatctaaccagaagaaattggatgctactaaaaacactttgaattcacagcaaaatttatttaacaaaagattgagagcaatgtatatgaacggaacaaattcatatctaaacatactcttttcttcaaaaagttttaatgattttgcttcaaaggcgaatgctattgggaaagtaattgaatttgataaaaatgttattggtaatgtaaaaggcgaaaaagaagacataagcaaaacacaacaatcgcttaatgacgagaaccaaaaactgttggcactaaagaaagataatgaacaaatgcttttaagtctaaacaaaaatgttggacagcaaaaggatttacttgctaaaacgactcaaaaggaacaaaacctattagctgaaaaagcagccgaggaacaacgtcaaaaagagttacaggcagctgcagcagcagccgccgcggcaaacgctaacaaagctaacaaagctaacagtgctaacaacagtaaggcacttcttgctagcccaagctcacagccaccagctgtaagtggttctgtaatttcgttagaagccactggttactctgatgatggtcttacatctcttggaactcctactgtaagaaatcctaatggctacagcacggtagctgtagatcctagagttattaggccaggagcaagactttatgtagatggttacggatatgctgtcgcagatgatactggtggagacataatcggaaatagaatagatttattcttctcttctaaacaagatgcacttaattggggacgaagaactgtaacagttcacattttaaattaacatttcaagcaataattaattaaagattgattttaactttctttaatttatactcatttctaaattaagctaaggattgctattccttagcttttttcttactataaaattactctacatttattcctatcatcttcattaaatacttagcatttgtagtatctgaaggtccatccttaagcttatagtcaaagattattttatcctctaaatatgtttctgaaaaatgataattttttattctacgcttttcatctgattctagttcgcatagctcaaagtcatgtgtagaaattaatccaaaaatccaattttcattcaatattttaagaactttttttgcaccggctattctatcattagagttagttccatgaaatatttcgtcaataagaaaaatcataggagtttttttcttcacattttctatcattttctttactctcataagttcaacatagaatgtagacataccattatttaaatcatctgttattctcatagacgtatatatatctaccactgaacatttcaagtttgatgcacaaaccggtgcacctgcgtaggctaaaactaaatttattccaacagtccttaaaaaggtagttttacctgccatattagctcctgttattacaaatattttattattcatatcaacatcattatttactcttttttcttcacctatcagtggatggccaacttcttttcctgagaatacaagtccactctctgagagttctggaaacaccatgtggctatttaatctaaaaataacagaaagacttgaaaggctctcaaattcccctatagcatcaacccatttagaaacaatctttccatatctatctttccatctttcaaattcgaaaacacattgataatcccaaagcattatgattccaaaaataacgtatccaaaaatattattcttaaattctagcttttcagttatacttattaaactcttaaatattctatatgctggtttattttcaaaatacaaaactgattttaattcctttaaataatcgcttttaaaatcttcattctctataatatctagtattctaaaataagattttaaatcttttcttattttatatattattcttaactgcggagctacctttaagtatcccatgatatttataagcatatgaagtacaaatagtgctgctataacccaatagtaagctttaagcttcatatatattataacaatactaactactatagacactactggcaaaattcttataaatgcctcaacaagaaaattcttaaacaaatgctctgtattttcaagatcattaaatagctcgcttggatcagtaccaagttcattagaattgccctgagactctacattttgacaaaagtcaattttatccttaagctcctctacagctttctgcctcattcttatcttttcaatatttttatctggcttctttagagtttcagctaatttctttctacctaaaaaagtcacacaagtatttattaattgaaataaagacttttttccgaatatatctaaatccccaagatacggatactcttcatcttgaaactcttctccaaaatcctgaaatgatgtccatgtaccatctattctctttaagtatttttcatttacttccactaaattgtttgctacttcaagtctatccgatatcttttcatgtatttttaaaatatacacaaacaaaacaaatgacaaaattgtacctaaaagtatgaatattgatgggttttttactaaaaaatatgtaaaggaaatagccataataaaaactataaacctaagcaaactcatcatattataattttgttttaattttgatttttcacttttaaaattctctattctacgtaaaaactcttcatttttatccataataagtttcccttcaatttttttacttcataattatatcatacatgtatattatttgaaaacaacatatttaaaattgtaataattttctctactaatagcattcactggcaatcctgcaattaattctatccctaattatgtaaaatttaatatcaactttcatagaaaaccatctatcttaacagtttaattgccatcttccattataaatttttttataacctttgctacaccattattatcatttgtatcagttatataatcagcaagcttctttgcactttcacaaccattttccatgacaacaccaagtccgccatactctatcattgataagtcattttcactatcacctattgttattatttcttctctctttataccgtaaaattcagctaaactctttatagcattacccttagagacattttttgatgtaacctcgatattatgtcttgatgagcttacaacctctatgtcattcattctttttaactcttctcttattgctgatatcttctttacatccttatcaattatttcgcattttataatatcattgctttccttaagcccgtttatatatgcactataatttttaacgtattttatctttagtgtattttcattattttttatgatagatcctataaaaataacccacattacaatataagcaaatttgcttgaacaaataatactatcgtgtgtatgaagagttatatttccctttagtctactgcatacattaaaaattcttgaaagggtgtctgaactaaggacatttttgtaaataatattattatctcttcctcttataattgctccgtttgatgcaataacaggtgattttacaccaatcaactttgaataaaatgcagcatttgcgtatattcttcccgtagttataactatatccacacctttcgcatatgcttttcttattacttccttagtttctccacttacacaatgtttgctatttagaagtgttccatccatatctatacatactagtttatatttcatagcttatcacccacattcaaattattggtcaggtttaaaaatttacatttagattaattttataatagcctgctatataacacaaggatatattatactaatctacaaaaaaatataggttgactactaggataaaacttgaattgatattcttcaaatccaagtcttacctttagccaacctactaccctaagtaattatactttttatacccatattttctagcttgccacagagtgcatccattgttaactctggatttctataaaactcacttccctttagcctatagaacttccatcctaccctttcaagtgccatttgcctttctctttgcttctcccaattttcaaggtcattataatttccactgtcacaagcaatagcaattctatttgaagcatcttctattataaaatcaactttatattttctaagatcatcaaaaggctttacattgtatcctctttttcttatattattgaagacatccttttcaaactcatctgcaagaaccatcttctctttattaattttatttttatttaaggcaggatcaagacagtaccttaaaaatttcgttctaacacaattatcgctcagcttgtcctcatctactgaataaaatacccacatttgatttctcgctctactagcagcaacgttaaatcttcttaagtccgcttcacgtgttagtgcggagattttacttccatttgaaactaccaaagataaaaacattatatctctttcatctccttgaaaagaaaatgcatctccacataaaatctttcttttaagcatttccttctctcctagtttatgcctaagcatactctcaatgagttcagattgctgttctccaagaagagatataactcccatagtcatgttatcatatttggtgtctgaacaacattctattatactatttacaattgcctttgcttcattttcatttgtttgccttatattatcctttaatccgtcttttaccttaacaaccttcacaggttcactaaaggcctcttttgccttcggatatctaagcggtattatctcatttgagtagcttaccatattgctaaaccctattatttcaggtacacatctaaaatgttctcttaaaagaagtctgtccggaaatactctaagtgcagtattgtaaaggcttgtctgtaaatcaaaccattgagaatgtggtattcccttaagatgtctatttataagttcatctacacttccttcttcaattccaaccgcttgaggacttatttgcttatcgtcccctactataacagctctcttgcctctaaaaagagcacttataccaaatatatcactttggttactctcatcaaatattacaacatcgaatagattggaattaagtccgatattttctataaccttatttaaaggcattatccaaacaggtatacaatctttacatttttccatttccatttgagccattttcctatacttcaatacaaattttcctgttcccctacctatcctttttacagcttgaagccatgcataaagacttcttttttgaatatctgttgtattattaatttcatttagccaagcttttttcgatacaatccttctaataagtactctttccttaattttttcattttcaattatttcttcaagattttccgtctttaacctatgtgatttttctagtatatcattcatttgcttccacttccaagcagcatttaaattcttatattgacttcttttttcagaattcaaaagcttactagtaaatataggtgctattttttcgattttatttttaagagaatttatctcttttaccgtctctaccatgttctttagcctttgaacttcagagtatgcctttttaatttttttgatatctctactttcaatggcttctgccataggttccattccataggtatttctcgataacttaaccagcccatttaaaaatgcttttgctttttcatattcagcaatacttttaatgctaattacacctttttttatctttgtataagtctcctttttataccaatccattttatttaaaaacgttatattttccatattaaggagtatcttatttttataattggcattccaattaactatatctccaatatcctttacctgcttttcaagctttataaaagtattcgaatcaaactttttaatttcatctcctttgaattttcttacactactattccaaagctccattaacttgttttgaatatccactttttccaaaaaaagctttaatatttcaatcttatctccaaattgaagatcctctccatcaacagcacactcattaaaaatataatttaaatttctatgtctaattttaaaaaacttattgattttgcctttatttttagccctagcatatatgcttttgaaatcctttgaaaacttttgaaaattcatgtcttctggcattgtgattttatgcgaaacaattatagtttgtatatctgaaagacggcgtatgtactcactgcttctaacaaacaaattctttatttcaggtctctcaatatcgctaaaatagtaacatgtcataacatttttaagccagctcttctcaatctcctccatcttactttcagctctatcaattagctgtataaccttatcatgatctatattaacctcttttttatagtttatagcccatccttttaaatttatcttgtccttactatgatccttaactgtgtaattttgaaaatttcttaaaatctcctcatactcaggaacttcacctaaaacttttagagaagaattcaccttctgcaaatcatctatcccaacattatttagtaggtatataaagtgtccaaactgttgattagtgaatggacactttaaatctataggaatttcatcttctatccaattaagctgtttttcatttttattaacccatttcgctatctccataagggtcattgcccttccacctacgtttagctttttattctcaatacactccaattcttttatcttgctatatgttttttcttgatactttctgcaaaacataagctcattctctaatggctttatttccttacttacatcgcttggatttaatgatagattttcagttattcttcttactgaatcatcaagatccttaagtgatttagtatcatcccctaaaagacttatgcataaaggttttacttctttaggtattttatccgaaagcacacgaagcgcccttcctgtctggcttgttaccaaaactctctttccgttagctagtaaatgacatatgagatttactatagtatgactctttcctgtaccaggaggtccttgaacaacgactccaaaattatcagaaagcttctttacaatttccttttgttcctcattgtaatgaagcggaaataataaattatcatttatctttttccaagcctcaacttcttcattattctcttcgatattttgagtttcaacaagagcctttattggcgccggaattggatacccatcctctatactatctataatactcaaaagctctttgttccaaagtctattgtcagttttcctcacaattataaccgcttcatcataaaacacaggatactttgagggttttattgaattaattgatgatacatgcttttgtatttcacctttaggatttatttcagcactaagatagtgtgtaaccttatatagaatatccttaacatttttcatttcacgaatatccaagcagcttttctcaaattcctctttaacctttattatctcgtccatattaggaattgctattcccgaaaacatatccaattcaagaatagttttgttgtcatatggttttaatataaatttcgcattttccgcatcgaaactcaattccatttttgttgtaaatatagggtggaatatctttctatcatccttgcaccatgaaagcatgtaatttccgcacacaatttcaatattttcattgttcttctgtattcgcaaataaagctgaaaaaaagaatcatacaattctttattttcctttcttatttccaaccatatttcctgtgaattatccagattaacaactatatttttattgcttttaagctgatttttccaatataatttatcatatttccctacatctcttattacgtcttcattcatgttttttatacttaacaagtaagaaaataattcctttactttaattttagtatccattcaaactcccccatattaataaagttttattgtaaaataatctatagtatatggttatattttccatttcttataacattataccacatatttacaattattcaaatttaatttcattaggagcaaaatattgatactaaattatattagacataattttatgagaatttaatgcaaaataaaacccccacacttataacttttgcgtgagggttttacaagaaaaccaatgtaaaacttaatttaaccgtttttcctataaattatattttatttacatgaatctctctcaattatattgtaatcaagtacataatgaagacattctggttctgctttatttattatttttataagcattctcattccaacagatcccatatcgtaagtaggttgctctattgtagtaagctttggataaaatattgatgatgtataaatattgtcaaagcctacaacatctacatcctttggaacatctataccattttctctaagtgcatttatagctcccatagctatctcatcacatgcacaaaaaacagcatcaatcttttcctttttaattataacatttattccgtctgttccatctatagccttcaaaccaccaaattgtattaaattttcattaagcggaatattgttatctaaaagagccttcttgtatccttcatagattatagctctagcattattttttaatttagggtttacacctacataagcaattttattgttaccctttttaattaaataatttactgcatcataggcagctttagcattatctattgttacacttggaaaggcattctcgtcttcactttcccttgtctcaacaagcactgtaggaatcttaagatctcttaataattgaagtatttcaggtgctaaggaattactcatgtaaataactccatcaaccatcttctccttaagaactctaatgtaatctttttctttcgatatatctaaatctgtattacataaaattacattataattatatatattagacacatcttccgctccccttactatctctgggtaaaactggcttgatatatcaggtataacgattccaattgttcttgttctttgcgtttttaaacttcttgctacgatattaggtctataatctaactttttaattgcttccattacttttttcttagtctcttcatttacaacgtctacattgtttagaactcttgaaactgttgcaatagatactctcgcttctctagcgacatctttaatagaggcagccataaaaatcactcctataattctatatttaagctattataattgtatctcacctgaactaatagttataatctttttataacatatttcctggtaaaacgcaaattttctattgttatataacatatacttaaaatttcaattaatatcattagaataataaatgataagcagtaggtctaaaatttatttatgatcctaccacttatcacttatacttttaacatttgtcaccaatacttagggattaacaattctttttaacaaatacgttaagttcttccccatttatattgtaaatagcagcttccttattttcactatatattatatcggttgctaatgtttcctttttaatagtatcttcaaattttctaattacattctcaagtttctcatttcctgaaacgtaaatctctattttatcagcaacttcaaaaccactttcttttctcatgttttgaaccttacttaatacttctcttaaatagccctcttctctaagttcatcagttattgttgtctcaagaactattcctatttctccaatacctgcaaatgcaaagccctcaagtccctgcattgtaacaagaagattttcgctgttaagttctatttcagtaccatctacatcaatctttacagcctctccacttcttactctttcagcaagcttcatctgatccattgaagaaatttcttttcttatcttaggaataagttttccataagacttaccaagcacaggtaaattaggctttatttcaaagttaacatatttagaaagatctgcgccaaactctacctttttaacattaagttcatctcttattatatctccataataatctggaagagcttttgtacttacacgcatttcataaagtggctgtctgtttttaatattagctccatttctagcacttcttccaagcttaactattgatatagcaagcttcatttcctcttcaagactgctatctatgagactttcatcgtattcaggccatttacaaagatgtacgctttcctctgcaccttcatttatactagtaactaaactctgatatatctgctctgtcatgaatggtatgaatggtgctgcaacctttgacaaagtcacaagaactctatataaagttacatatgctcctaccttatcatcagtaagctcttgagtccaatatcttgatctatttcttcttacataccaatttgaaagatcatctacaaaatcctgtatttcaagcgctgcttgagttattccatatgaatcaaggtaatttccaacatcctttgtaagtgtatttaacctagatacaatccacttatccataacatttccagaaacaaaatccttatagtcatttggattgaatttatctatttccgcatacagtacatagaatgaatatacattccacaaagtacttaaaaattttctttgagtttctgctacatcttcctgtgaaaatctagttggaagccatggtgcacttgatgtgtagaaatgccatctacaagcatctgctccctgattatctaaaacatcaaatggatctacaacatttcccttatgctttgacatttttagtccatgtttatctagaacgtgacctaatactatacaattttcaaaagagctcttatcaaatattgatgtagaaattgcaagcaatgtatagaaccatcctcttgtttggtcaacagcttctgatataaactgtgctgggaaggtattttcaaacacttccttgttttcaaaaggataatgaagctgtgcaaaaggcattgaacctgaatcaaaccagcagtctataacctcttcggttcttgtcataggcttaccacacttaggacatgtaagttttacttcgtcaatgtatggtttatgaagctctatgttttctggaacattgattcccttctctttaagctcttcaatacttccaacgcaatctctatgaccgcattcacattgccaaattgggagtggtgtaccccaatatctgtctctgcttataccccagtctataacattttcaacgaacttaccaaatcttcctgtccttatgttatctggataccagtgaattttattattattttcaactagtttatcccttaaagaagtcattcttacaaaccagctatctcttggataatataaaagtggtgtatcacatctccagcagtgaggatatgagtgagtaaacttctctgacttatataaagttccattttccttcatgtattcaagaatcttaggatctgctttctttacaaacaatcccttccatggttcaacttcatccacaaatttaccttcaccattaactaaatttataagtggcaaatcgtattttttaccaagcatgttatcatcttcaccataagcaggcgctatatgaactattccagtaccatctgataaagttacaaaatcaccgtgtacaacataaaatgcttttttatcaggatttgcaaatttaaatagctgttcatattccattcccaaaagtttttcacctttgaactcagaaactacttcatattctccttcaagtacagttaaaagtgcttttgcaagtattaaatgctctccattgtttataacctctacgtaatcgtaagccttattaatagcaagtgctacgttacttggaagtgtccatggtgttgttgtccatgctaatatatatttattttcttcaccttttactttaaatttaacaaaagctgttgcttcttttacatctttgtatccttgagcaacttcgtgagaagaaagcgcagttccacacctagggcaatacggaactattttatgacctttatataaaagatccttatcccacatttgttttaaagcccaccatacggattctatataatcattgtgataagttacataaggattttccatgtcaacccaataacctagcttttcggacatatccttccacaagctaacatatgagaaaacactctccttacattctttaacaaacttttctattccgtattcctctatttgaggttttcctgaaattccaagtttcttctctatctcaagctctacaggaagtccgtgagtatcccatccagctttccttggaaccttgtagcccttcattactttatatcttggaattaaatccttcattactcttgtaataatatgacctacatggggtcttccatttgcagttggtggaccatcataaaaactaaaatattcaccatcctgatttgagttaaagctttttttcactatttccttttcatgccataattttagtacgtctctttcaatgtcaacaaacgatttgctagaatcaactttcttatacattatgaaactcctttccaaaacgttagtcatagaaaaactagtagagaattcgcttacatacataagtttcacaactactaactttcctattttttcattcacatataataaaaaactccgccctaaaataggacgaagttacattcgcttatataccacctatggtttaatcttcaggcactttttaataccctattctttaacgcagaattacgaaaaaacttactataatttcagtctccagctccagggtgattttccttaaacttaagctgcaaagtttccaccatttccttgctctctataagctttcctaaaagtacttttccctttctacactattttccttaatattaatatattatagcttatatcgtattatattacaagatattatttatgtcaaatgaatcaattatagtcactatgccccttatcttttctaactatatttctaatcaataaatcactaatataagtatatttattaatcataataaaattaaaacctctgatagatatgtattctatttctttttagtgttttacttatcataatattggttaaactttatatagtatataactattaactaaatttatcaaaaatggggtgctagttatgaaaaaaattgtcttaatagttactcttgtaatattttttttagctactggttgcaaaaataccactattagtaaagcctcaaacaatacacctaaacctaacaaaaataaaattttttatgaaaagtatgaaaaagattgttatggtaatggaaattccgttggaaatattagcaactatggtactgcctgcgaagacacgaattacatatactactctataacctatggtgctacaggaatatacaaaatgaattatgatggctcaaataaaacaaagctaacctctgacaaagcctactatttaaattcagataaggattttctctactatagaaatgtgtccgatgaagggagactttataaaatcaataagtcaagcttaaaaacttcaaaattaaccaatgataaagtgttttatcttaatctttcaaagggctatctttattatcagaatgaaaatgacggaaataaattatataagataaaaactgatggttcagacagacaaaaactaaacgattcatactcctcctatatcacagttgttgacaactatatatactatcaaaatgaaactcttggaaattctttgtatagaataaagaataccggagaagatgatactaaactaaacgatgacacttcaatttacataaatgtttttaatgactttatatactatacaaatgattcagataacggaacggtttataaaatcaaaaatgatgggagtgagaaacaacaggtagacagtacttcatctcattacttaaattttagtggaaatttgctatattcaagtgataataaacgaaatctattctttagaattaataacaataacttaaataaagtagtatttaattctaatagaatttcaaaaatatcaaatataaatgttataaatagttttgttttcttcgacggaacgactaatgatggaaactcaaattacattatgaaaactgatggaacagaacttagaaagcttcagtaaaaaagctatagtagctctaagctaaaactactacagcttttttgtaaaagtttattttttatctgttctattacaggaatacttgctttatgataaaaaatccattaaatttttattttttctacttaaacagtttcctttttcttttacgcctctttccccttttaccttcgttgccataataactgtaataacctctactacctacttttaccttgttaagaactgttccaagtatgttggcatttacattttctaaaagttctttagctcttttagctgcttctatttcagccaccccagaacttacaactaaaatcacaccatctaccatagtagaaagaatttgagggtccgttactgctattataggaggagtatcaagtattatatatttaaatactccttttgattcatttaagaattctttcattttatgtgatgcaagcatttctgcaggattaggtggtattttaccagaggttaaaacacaaagtttcttattaaaataatgagccgaatcttcaaacttagcttgtcccgctattatgtttgataaaccagaactattagataatttaaattttttgtgtatgcttggttttcttaaatcgcagtcaacaattaaaacttgatttcctgtttcagccatggcaagtgctaaattagctgccgtagttgattttccttcacctggccctgaacttgtaaccagtataactctaatttcttcatcgaaacttgaaaactgaatgttacttcttaaggttctataagattctgctactggagatttaggattatccttaacaatcaacattgatttttcaccacctcttatttttacataaaagtaatattattacattagtatttaactctatagcatcaaacttttatgcattatatgcattttaagcttgattatactagatttatttattatacaacatatacgtaataattgtgtgaactttaaaatatatatttttaataatgtgtaaatttaaaaaggatgattttgtttatttgaaaacacttgtacaaatgaacaaaaccatctaacctatgctaattgtttacttattattttttttaagaaaagtaagaccttatttgcgcccaaagccaaaattactggtataagtactcctactatagaataagcaatccaccaaaaattattcatatttattattctatgacttaaataagagtaacttaagttatatatatatatttgcgctaaattaatagctttgaagcaaattatatgaagcgctaaaatagttaaactattttttcctatgatttcaataatcttatatgcatttttctcaactaatattttggataaatacaaatttaaatatattcctagcacggaatttaccaaaaataccgccggatatataaaaaagttgcccatattagtgcccacaaattggcagcttataattattcctattaagcttattattgcaaaatatatatttaacgaaacatgtgctttatactttttatatatatttcccgcccaaaatgctaataaactaacaggaacaagactagctgtaggaactgtaaatgcagttttattattacctatatgttgtgttgcaactacatcaatgacaaataatactaaaaacaatataccttgtaaaatttcctttttaaaacctttaattttgcaaaaaacaaaatcaataagaaaaaatattatattagtaataaataatacctttataaaccaaaattgaccaagtacttccgattgtatttcatgaaatgttaaaattttagctgcggagcttataaaatcccccatggaataatacttaaaatgataaacattgaactttataaagaaattatgcagcactaaaaaaataagttcataagctataaaaggtatatacaaggtctttattctctttttaatcagtgttattggtttatgagtatatttatccttgtaaaaatatcccgatataaagaaaaataatacaacgtgataagaatatacaaatctaagcaaaggagactcagtatgtcctattactattgcaataatacctagtccctttatgacatccatctcaagcgaacgtttatccttcatagttttccccttttgtacttactttcctactccccgtcataaaaggtaaatacttctttatagctgaaataactggttttaatacagctatacatattaatatatctattaaagttataaaacttcttaaaaagaaattactttgaggtatactaagtaatttttgtataggatctaaaattactataaacacaataaagtgcagtcccataataaacaaactattttttccaagccattctagaagctttgattctcttatcaaatttgaaaatataataacggtcatagaaccagcaattgccgctaaaataaacattggataaataccatatctgccaactatcatctgaactatagaattatttgcaactgaaagtactaatgttaaagcaagcattataaatagtaccggaactgtgtttatttttatatttatttttacgcctttaatgaaattgcctagtgcataaaacacaagacctgtaaatgctatgtctaattttaaaggcaaataaactttaaatactgatgtgctccatcccaaagctaggaatatcaatataaaaggtaccataatccatttattacgtgaaagcttactaataggatagtataggacacatactacaaataaacacattaaaaaccataagggcccattccaaaatccgcttggggttaaataaaagaattcacttactgcttgtctaaagctaagcttatccagtatattaaaattcatagctataacttctactattagtgaaataatccaaaatgatatataaggtataattatagttctaaacttatgtttaatatatgaagtatattctgtatatttgtcagcattatataaatatccagatataacaaaaaacaaaggcatatgaaatgaataaataaacttcaccataatattaggtatagatctatgccctaataaaaccagtaatattccaattcctttagctatatctatactttttgtcctttgcattttttgttttccctccaaaaggatttattatttaatcagttttcctcttcatgtccatagtaataatagctgccataatagccttttctactttcagtatcaactctatttaaaactgaacctattatattagcatttacattttctaaaagttccttcgcccttttagctgcttctatatctgcaacacctgaagtcacaactaaaatcactccatcaaccatagtagataaaatctgtggatctgttactgctattactggtggtgcatcaagtattatatacttaaaaactcctcttgcctcagctaaaaaagctttcattctctttgaagccaacatctctgcagggtttggaggaatttttccagccgttagtatacataaatttttgctataccagttgcttgcattctcaaatttagtatgtcccgctaatacattggataatccatcattattagatatcttaaactttttatgcacacttggctttctcaaatcacagtccataagaagtactgaatttcctgcttctgccatagctaacgccaggttacacgaagtagttgattttccctcgcctggtcccgaactagttacaagtattagctgcatatctttatcaaaacttgaaaattgtatattacttctaagtgttctgtaagcctctgctataggtgatttaggcttatctttaactactaacatgtctctctccccttattcctcttcataattaggtattacaccaagtacaggtaaatccaaatgcttttttatatcttcctgcgtctttatagtcttgtccatatattctttaatgaaggctatacctacagatataaaaagccctaaaataaaagctatagcaatatttatcatttttttaggctttattggtgatttaggtgctgtcgctctatcgattattctagcatcgcctgctgtgtaaactgcctttgacacttctacaaaactatctgaaaaatcatttgccaaatctgctgccttatcaggtgattttccattagctgttatatctattatttgagtacctgtttgaggcgtaacactcactagtcctaaaacctgatctgctgtagttccatcagctaatttacttacagttttatccgcaacttgtttagattgtgcaatttgagcatatgttttagtaagattttgtgacatcataacatcattatactgctcatttgtactggactttgaatcattttttcctattataactgtaacgtgtccttggtaagttggttttattataaaaaaacttaagatagctgaaaataatacaaaaaatatggttactgccgcaatcatcgctttttctttatttaaaacctcaaaaatcccagtaaaatctatatcattttcctgttccatcgattaacctcccatgtattttaaatctgtatcattattttcattataactattacattataaactaaaagctctatgttataaatagttttagtctttttattttaaaaaagagaaaaaagtctttttctttttcaattttcgtactttattttcaattttttcattttcaagaagcaaattcgaattttttataaacttttcggctaatgttttatcaatttttgtcaaatcatgaagtgctttttcataaccagggcatctttttccagctgaatgtgcatctgaagcaataaaactaattacaccctcctctactaactttaatgctgttttttgtacagtctttccaaaaagtccttcgatgcttcctgcatttacttgaaaataaatattttcatccattaattcatttattttataaatatctttttgaatataagtgtatctttcaggatgagctataattggcttaattccttttatttgaagctcatataaagtatctattgcattctcgccaagtgacatcatatcaaattcaacaagcatatagtctgtattatttatagtccctattatcccctctttatagtctttaagagtataattgtctataaacacttcttgtcctggtataacatcaatgtctacacccttttcctttaatgtatagttcaactcatttgcttttttctcaataactgaaatactgttttcaaattttcctctataatagtgggaagtagcaaccattttagttactcctgcttcttttgctatactcatcatatttaatgttgtttcaagagaatttgaaccatcatcaattcctggaattatatgtgaatgaatatctaccatttaaccaccccttacttttctggtatatttacaagtgaagctttaggcgaaggctttacatcttcaaatatatattttctcatttgatcagaagttacatttaaatcagttttaagataccaaacattgtcaacagtaacaccgctacaatacccatctaatggaaatctttcttggtctatattacttatatcagatgaaataaattttgttccatactttgcaatatcaatgcttcccatatttgtttcagtataaggtaaaatttcgtcaaacatacttaccatattgctttttccttgagcttgtaatttattaaaaactgccataagcacagttctctgtctctcagttctcacaaaatctccaccagctgtgtatctaattcttgaataagctacagcttgtcttccatccaaaagctgtttaccagatgaagtaacatgattaggagtgaccttctcatattttgaaacctcgtctatatatccattaagatatcctacttcatcagattgaacatttatttccacaccattaagcttatctataattttttcaagtgcataaaaatccacagttacatagtcctttatgtttaatttaaaattttcatttatagtttttattgcaagttgcggtccaccataggcataagcatgagttatttttgtcataccatgtccatccacatttacatatgtatctctcattattgaggataacttaagctttttatgtgctgggtccattgttaatatcattatagaatcagaacgagaaacatctgtttttaatcgcctatctacaccaaataatgcaatatttacagtatcactgtacttgcttaaatcgtcttgtgttttattagatattccaagctcagatggcttctttgatatttctgtttttttcattttactggttttggaataaaagtaagctgttccagaagctcctattccaaagattaaaatgaaaaagacaataaaaaactttttccagaatccaaatttctttttatctttagttttcataattttctcctcttaacctcttttaatttttttatataaaaatgctgataccatatttatttcctctaccttcattaagtataaaatcagcatgtatattaatagcgctattagagtaattccaccaaatccaataatctcaattattattgctttcttaagcaaagcttgtcctactatctgatagagtacctttaagaatattcccatgcctattgacgcaaaaataacctttatggtgacacctattgtttttctataattaatatttttaagctttgagtttagctttataaaaagtaaaatactagatacataagcagctattgatgatgctaaagcaatacctccaagtcttaaaacatcttttaaatagtatgccaaaactacatttacaagcacagtaattgcggagtttatcattggcgttctagtatcctttagtgcataaaacatcctacataaaacttctctaagtccagctgcaatgatacctataatataataaaataaggctgttgaagtcatcaacgttgatttatttccaaatgcatctctctgaaacaatatttttactatgggcacactttcaattaatattattgttattataggaaacaaaattatagttattgatcttatagaaatattaaagctttcaattaattctcctattttgttttctgaggatagctttgtcatttttggatatataactgtaactattgatataacaaatatgtccataactaacgaattaagtctagatgcataacttaaagctgcaacgctcccggtttcaagtgatgatgaaaatctcccattaaaaagagatgtaatctgctgaacgcttgtccctagtaatattggaattagtaagacaaccatactttttaaatatccatcggaaatattaaactcaggtttgtatctatatttcatacgtgctaaagaaggcacatgaattaaaaattgaacaaacatagcaaatacaataacttcagttaatcccaaaacaccatatttagaactaaaaaatagcaaatacacaattactaataaattatatggaattcctattaaagagggtattaaaaaatgttcctttgcctgcaatatagcagtagataaaaatacccaagtatttactatgattatcaataaaaatattcttgttaactttattgtcaataagtacttatagccatgaaaatccggtgctatcaatttaacaaattgcggacaaaatatctctcccagcaaagttaaaattattgacaataaagtcaatacagttataacattattagaaaacttaaaagcccttttttctcccttatttacaataacatcattaaatataggtacaaaagtatttacgatagctgctccaagtatagcaaatattatattcggaacaacagaagacattgaaaaagcatcagcagatacactcgtaccaaacttagacgctgtaataaaatctctaataaaccctgttatcttagataataagtttattataataaccattgaagtaacctttaacagggatatcctcttatctttagccattttttcccctctcatacaagcaaatatctaatcaaacttgtcacaatatactatgaacaatatcattggaatggtaaaatgtattgaaccagttgttattgaacttattataaaaactaaaattttagttatatctgtaattttcttttcgttaaaggctcttctaagattttttatcataaatataaaaatacaagctataagaggcactccaaatctagaggctatttctaaaaataagttatctgagaattctacacttgttatagctgaattaacataggcgtacatctgtacttttatgttaaatggagctccaattgcccagtatttctttatatattctattgctacctgccatttgatccatctgttatctgcttttatgtagcttgcagaaaagaaataaacattgtatttacttatagcaatccatagagtaatacctattaacacaaccattaaagaaattataccaaaccttacaacacttttagcatttttgctgcgtattatttttataataatatataacaagagtattccaatagctgttctagaaagcgttagcattatgcatactattagcaagaacttatataatttgaatagcatcgctagattcttttgacctctaaaatcaactattaaataaaccataacaaaatacaatcctgcatgatttggtgatgcaaaaattgacagcattctagttttatttagaaaccccatactataagcctgtattatatctggagctgctaaaccataataattattttttataaagaatataaatgaaattaccattacaacagttgatgatacaattagcgtgtttattacactttccctttttatatcaatgtttaaaataataataaagcatacaaaactaaatatataatttaaattattattatcacttagccatcctgtaatatcagacatttgatttatgcttagaattttaaggcctaacactataaaaaacactaaataaataaacattattcccttgattttagtcgtcattcctttgatttttcccttaagtacaatcgcaaaaatcataaaaagtaatataccaattttaatagcattcacacctgaagagctttcctgttgcagcgttaaaacaccttttataaaaacctcaaatgtgcaaaacactataaatacgttcaatagtatatgtcctaatttatcatacttctttgttaataccatactttgtccccctatgctcaactacttacacaatagagcatactgtttgcaataaaattgagctatgttacttatatcatattttttactttctttcatgctgtttattttcatcatttctaagtcagtttcttccttcattaagtccgttatagcatcttttaaattttcactatttctttcattaattattacaccggagtaaccattttttattatttccattggtccatcacaaggtgttgatataactggacatcctgctgcaaatgcttctacaactaccattccaaaggattcattaattgaaggaactattaacgcatccaaaagagctaaaatatcgggtacatcatttctctctccaagtataagaacatttttctgaagtttatattccttaatcatttctattacttcatttttatacatactatccttgggattattgaaaatactatctccaactaaaagaaatttataatttttgtaccccgcctctacaatatcccttgctgcttcaataactaacttttgccccttaattggctgaaatcttgctataactcctaaaactttatcttccttctgtatatgcaattcttctctaagtttatcaccatttcctagcctaaacctatctaaatcaataccaagattctgctttaaaagctttctcttattgagcttatttattatcaagttgttctgaacactttccgaaacagaaattattctattaattagagaattgaccaatactctttttataagattaaatttataccattgtccatggcatatccaaataatcttacaatttttacttgaaactttgcttatgatgctaaataataccgcactactccattcattgcactgtattacatctatattatttgaatacaaaaattctttaataactttaattgctttagatatttccctaaacttaaagcttttaaaggcagctttaaaatcaaaaaccttacagggaacattaatccccctacacttatccactaatttaccttctgttttacacataagaaaattatttatattatattttttattgtcactagcaaactcatttatcaagttaaataaactagtttctcctccacctaaacttcccaaatctgaaacaaataatatattcataattcctccattagtgtctttgaacattataggaaacaacttctaaaacattactgtgtcttaaaaaccttgccaaaatctcgttgttcaagtcattttgttttacaattcttagaaccttacctctatttttagctgtgttttcatcactcttatataacttttctatattttttaatagtctttcactactaatattactgccaatccaattgccaccatttccaacattctctgctatatctaaaatttcaaatcgtcttgcaacactataaaccttaggatgataaattaaaggaatcaccttttttcctagcaccaacgacattataacagaatgatatctcattccaacaattatattttcattattcagctctccaatagtatcatacatatcatgtgaatttaagatttcaacattacatttctgatttatactttttaagaaccctatatcctcagaataatgaaagggcaccagttttattttccagttttctttttttaatctattgatagtcttaataatttcttctttatattctttaagctcctttgtattatctttaaaaagcttagccaaaacaaatgaaatttttttttctgttacgtctttctctggatatttattttgtattatactgcatatattgaaaacagaatcgctagttaagataacattcttaagacctatactctttaaaagttcataagattcttcatccctaacagttataacttctaattttttcaacttattgtaaaaccttttttttgatttctcatgaagtattggaccagctcctacacccatcatacatattggcctattcataaaataaaacaaatctataaggaaaaatattgttttagtagaactaggattccaatcagaaagtgctccaccactggctattataagcttatttgaacataatatatttaaaatagccttaaatatattatgctttaagattgctcttaaaatagattttaaagtccaatttatgtaagttgaaattctatttagccccaaatggttatgaattttatttataactttaggtttagttcccatgacatttaccttaagtctgtcatctattttttctatcattcttacgatacttttcagaataagctcgtctccaatattctcctctcctacccaactgtatataagtacttcatctttcaaaaaaaatgcctccttatctactgaataatttcatataagccttttcccaactataataagatttaactatatttcttccatttgctccaatatcttttcttacagaatcatttgataaaagcaataatattttatctatccactgcttatcatcttttgcaatgaatatatttactccatcttttaattcatttattccctcaacactaacctcacttgctactattgccttgttcatgctcatagcttctagtactttattcttcattcccgttccataatttagtggagaaacatatactgaagcctttgcgatatattctgctatatcatcaacaaaacctgtaacaacaacattttttccttctaaactctgtacgtcactgtctggattttttcccacaatataaaactttatatcaggatatttttttattatttcaggtaaaatcttgttataaaaatataaaacagcatccttattaggtgcataattcatgattcctgtaaatacaatgctcttttcctttagatctaaattatcatacttgtcgctgtcgaaattttctatgttaactcctaaatttatgtgatcaatattagctgcactttccttgaaattgtcttttacatacaatgcatcactctcagaaacaaagaaaactttattaaactttttataataattcttttcaatttttttgtagtatttatattgaaggccgttatataccttacctataagatttttttgccccatcttatactttctatggaaaaataagcttacacaatcacactcaaaaaatattttattagtgcaatttatcatatcctgaaaaagcacacttgaaaattgatcaaagaatacaacatcatagtgatttttctgaagctcataacaatagctttttagcaaagaatgtttgtattgatatagcccatatggaattccttttaaaatactcaacattctatcaagaggacttattcttacacgtaaatttttattatatacactatcagcatactttcttatttctttttctgcctctttatcgtattcatcataatataacaaatctatagtattacctacacttttattctgctttagtaaattgtaaattatcaaagctcctcctgatttatgcggaggataaggacaacttggagtaattattaaaattttcataatcccacctcaccatacaacctttgaagctcatcaatggtaatatctaaattaaagctattttcaactaattctctagccgcacttattaactctttgtttttatcataatccgaaagaatatcacttatcttagttataaacttttcactctggtaatcatctattacataacctgttttatcattgatgacgcaatctctaattccaccgatatcaacgcttataactattgttccaaccgccattgcttctaataaggtcataggaaatatttcacgagttgaaaccaaaagcattacatctacactagacaaaaattcgtaggaattctctatgttaccaagcatcttaacttttttctttagattacttttttctatcctattattaatctcttctctaagaggaccgtcccctccaattagagccctaaaatcagctttctcagctatatccaaaaaaaactcgtggttcttttctttagataatctagataacattccaactttaaagtcttttccagcatctcttaagtatttagaattaaacttaaaatgttttaaatctatactattaggaataactttaactttttcttcactaacacctatagaaatcatattatctctatccttattgcaaaccgctaaaactatgtctacattcttattaacaaatgcactaaataattttgtgtgtattttctctagtatagttaagttatgcttcgtataaactatttttaaatcctttttgtacagcttttttactattgatgaaataatagctaaccttaaagaattagcatgtatcacattaatattttttgatataacaatttttttgatagtttttatcttactaaacaatcctttttcgtattcaaaatacatgtgtttattatttaacttatcaaagcatcttccattaactgctgctgtataaaaattaattttttttaaatctattttattttctatcttataaaaataagtctcagcaccaccaactctaagctcttctgctaaaaataatacatttgttaaactcatcctatcattcctttttggttcatatgatttctgtaacaaaagaatataagttttttgttattctcatatcagttttaatattttttacttcctctttgccatacccagtcataactaaaaaagacttgatgttattatcaacagctggaattaaatctgaaagcttatccccaactgcataagatttttccacatctatgttgaaatcttttattgctctcttatataaaccatcctcaggctttctacatttacattgaagcttgtactttccaaccccatgaattggatggtgtggacaataataaaaggcatcaatatgagcatcatactttttaagctgcttttgaatatactcgtgaagtttatccacagcttcttctgtgtaataccctcttgccactccagcctgattacttataactataaccttatattcattctgatttaaaagctttatagcctctacggctccttctgtaaattcaaaatcttctattttataaagataatttttctctacatttattgtcccatctctatcaagaaaaactgccttattcatccactttctctccaaacaattccttttcaacaatatcacatacaatatgtcctatcattatatgtgcctcttgaactctaggagtatcctctgacggtacaattaaaggaaaatcacagtaatttttattttctcctccatccttacctaaaaaaccaatagtggttattcctatctcctttgcttttttaaaagctagtgttatattttccgaattaccactagtacttattcctattagcacatctccctcttttccaaatgcctcaacctgtctttcaaatatatttttataggaataatcatttcctattgaggttaaaacagatgtatttacagttagagctattgctgggagtgcctttctatcaagcctaaacttacttacaaattcagccgctatatgttgagaatctgctgcacttccaccatttccacatagcaaaaccttcttccccaatttataggcttgtattacaatttccacaatactttgaatttgttctatatactgtccgtcttttaaaattttctccttagcctctatacttgactttatttgagcctctataaagttcttcatccaatatcctccatagtattaatgccaaatttatatttgccctctgttgtggcaactgcaatttcgttataattccatctagaatcgtctaccacccagctctgcattccacctaaatcaaagttccaatctgttagttgtcctcccatcttctcaagactttcggcaacaacatgctttttattatatggacaataaactaaaaggtatcctcctccaccagctcctaaaagctttcctccaagagctcctttttttaatgctgcttcatatagttcatctatttgtggatttgatattctgctgctcattttcttcttcatttcccaaccgtaatgaagtaaacttccaaagttatttaaattatttctaagtagctccttcttcattgcatatgctaaagcctttatctcgtgcatagcatttactacttcttcctttttctctacataattattaacctgatcctttatgatattagctgaaacgtgaacatttcccgtataacataaaagtagattgtattgaagttcattagttattcccttatttatttttaaagggtttacaaccacatcgcttccgtctacctccataaaattaaagccaccaaatgcagcggcatactgatcttgatagcctccgtctattttcaaatcttttctttcaacctcataggcaatggatgctagagcatattgatcaagtacaacacccttccattttgccatagcacctaaaagcgccactactactgtagaagatgtaccgagccctgagcctgctggagcatcacactgaaggtaaacctcacagcctttatttatattcattctttttaatgcagctttaactaaatcaagcttaccatcatataccagattttcattgcagttatacttaaccgtcatatcaaaatctaaagaattaactactatgctatcagtgttattgggaactattgaacagtaggcatacttatctattgttgtgtttaatactaccccaccatattcattgcaataaggctcaacatcagttccgcctccaccaaagcttattcttagtggtgctttagctcttataatcaatttccactctccccttttaccttagtacaaaatttgatgtaatcctctggcactcctatatcaataaaataattgttacatttgtagccatatataacttcctcacctaaaacttttggtataatctcagtttccaatgaaacctttttttctctttcaatttctttaaaaatctcttttttcactatataaattccgccatttatatagtttgattttgatatgccacccttttcaatgaaacttacaactctattatcatcactacattcaacagctccatatcttgatgcatctgatgtttctcttaaaatcatggtgaaatagcttttattattcttatgaaacttatatgcagattcaaaatcaacatcaaagtacgtatcaccatttaaaacaaaaaattcctctttaaggtattcttcagcgttttttattgcaccagctgtaccaagctgagtggtttcctttgaatatacaatattaacaccaaattctctaccatctttaaagtagttttctataaattcactcatatatccagttgcaagtataatatcacttataccattgctctttaactttcttattaaatactccaagaatggtttattttctaccaaagccattggtttaggtctatcctttacaactgatctcaatctcgtccctaaaccaccaactaaaattaatgcctgcatactatcaccctttatttattaggttaaacacttcattccatgatttcattttaatattccaatcataattattacggacaaattccttaccatttgaacaaatcttattatataattccttatcacttataagtctaagtactgcttctgcaaatttttcttcatcatcctcaattatcatatccttatagttctctgcatccataccttccgctcctatagatgtcgtaaccactggaacccccatagccattgcttcaagtatctttgtttttattccgcttccaaatctaagtggagctataaacactctactttcctttatatatcttcttacgtcctctactcttccctctatatcaacagctttatcatttttaagttttttaattgaatccgtggcatttccaccaactaatcttagtactatattgtgattctctttttttataattggaaatatactattataaaaatacaacactgcatcttcattgtgtggagcagaataaactcctaaaaagcttattaaattttctttaaccttaacatcaaccttagaaaaataatcacaattaactccagtagaaaccgtcacagccttttgttcctttaatttagcgtttaaacgatctctttccctatcagacactaaaaccacagcattataacttttagaaatcttcatttcataattacttaaggcattacattcatactgaagtatttttcttttaataaaattgttatccagtatcttagaaacaaagcttggcaacttattagaatatgctccaaaaggatttattattcctccctttgattccagttgtcttccataccttaccgaaagcatgtcatccatatcaaatattttctttcccttaaaatcctttaagtattcactggttctaaccatatctgccattactatatcaggattttctctgctaacgattttctccacagcttccttggtatcagccgaataatacaaagcaacctgaagtggcattctctttacaaataccatactaaaaaaattagataaaagtgccttttttcctggggcctttattttataaagtgttcttatatactcatttggagtgtctacaacttcagttttctcatcaaaagtaactactataatatcgtatccatacatttcatgtagatattttatatagtaatacaagctcatttctctacctgataacggattcaggggcaatctacttgtgaaaaataaaagttttttcgtcattttaaatacctctttacataagtcctaattattctttaacttttttcttaatctcttttattctctcaatatcttctttctttccaacaaatattatgtcatcactttcaaccacaaatacctctgaaagcccaaccacaactatcggttttttcttaccaactagtatattattcttgctatctatactttttatatctcctacacagacgttgttatcctcgtctttatctctatatctctcaacagcatgccaagttcctatgtcatcccaaccaaaactgcatggaattacgtatatgttgtccgctttctccattattccataatcaacggatatagcctcaacatctacatactttttctttaaagtttcattaaagttagtatcatttgcttcagctatttcattcaaaatattgtaggttttatttaagtatttttcagttagcttaagaattgtagaacacttccatataaacattccaccgttccaaagaaagtttccagcttcaacatagctttcagcactctttttatcaggtttttccacaaaactttcaacctttttaatttggaagccgcttatttctttttctaagttccctgattttatatatccataacctgtttccgctctagtaggttccattccaagtgtaactattgaagctttattttgatctataaatttctctgctgccgctatagtatctaaaagcttactatcgtcaactattaactggtctgaaggcagaaccactatatttgcatccttatagtgtttatttatcacaaaagctgacagtgctatacaaggcgcagtattctttccaacaggttcaactattatattcttttcaggaagattgggaagctgttcttttaaaagatcaacatatctctctcctgttaccacaaaaattctctcgatatcaattagatcttcaagcctttcaactgtcatttgaatcattgttttatcgcttaataactgcaaaaattgctttggcttttcgtctgtcgatagaggccaaaatctctctccctttcccccagccattattagtgcacaaagcatatattacgcttcccccttacattgctccttctttttttataactactataaaggtcataaacaatattttaatatcaagccacaagcttctattgtctatgtactgcatatcaagcataactctttcgctatacgaaatatcacttcttccgctaacttgccaaagtcctgtaagaccaggtttaacgcttaataacttctttccgtatctgccatacttatttaattcggcctcaactataggtcttggaccaactaaagtcatgtttccccttaatatattaaaaaattgaggaagttcatcgaggcttgtcttccttagaaatcttcccaccttggttactctgggatcatattcaagtttaaagttttcctcaaactcctttttttgttcgggtgtcatattttttaaaactgtttctgcattttgaaccatagttctaaatttgtatacctttatatgcttacccctatatcctaatcttatatgtgaaaaaattgcattgccttttgaacttattttaatataaatacatattgccagcataagagggctcagcacaactataccaattatagaaaatactatatctataactcgttttgatatataatatacattactcttgtcataatccttataaggctcaactgtaattctgtcatattctaggtccaaatcctgcaatatatgtccctccctttaagttttaaactgaacttattattttttagtatcattttattttttagtatcattatacactattttttttattttttcatcagctttcatactatttcagcagtttattttaaccttttgtgtatttacatctaattatttactataatatccttttttttattatcgtattatatatttttatactttagaaataaaaaaagatgattttgtcatttaaggtgtatatacatacaactttttaatgaacaaaatcatcttttttagtttttatttatgtagttttatctatctttatgtttttttactttttctccctcatcaccgtagtagtaataataacctccataatatcctcttctactttctgtatcaactctatttaaaactgaaccaattatattggcatttacattttctaaaagttccttcgcccttttagctgcttctatatccgcaacccctgagctcacgactaaaaccactccatctaccatagttgacaagatttgtgggtcagttaccgctattacaggcggagcatcaagtattatgtatttaaaaactccttttgcctcattcaaaaatgccttcattctctttgaagacagcatttccgcaggatttggaggaattttacctgctgtaagtatgcataaattttgattataccagtgacttgcactttcaaatttagtttgtccagctaatacatttgacaaaccgatattatttgatatcttaaatttcttatgaacacttggttttctgagatcacaatctagtaaaagcactgaatttccagcttccgccatagccaaagctaaattacaagaggtagttgactttccctctcctggtcctgaactagttataagtattaactgcatatccttatcaaagcttgaaaactgtatattacttctaagtgttctataagcttcagatataggtgatttaggcttatccttaactactaacatttctctccccctttattcctcttcataactaggtattaccccaagtactggcaaatctaaatgtctctttatatcatcttgagtttttatagttttatccatatattccttaataaaggctatacctattgatacaaaaagtcccaaaacaaaagcaactactatattgataagctttttaggctttataggcgatttaggtgctgttgctctatctattattcttgcatcaccagctgtataaacttcctttgaaactgctacaaaactgtcagaaaaatcattcgctaagtccgctgcttcttcaggtgactttgcatttgctgttatatctattatttgagtacccgtctctggtgtaacactcacaacctttgatacctgatctattgtagtaccattacttaatttacttacagttttacttgccacagatctagattctgcaatttgagcataagtttttgtaagattttgtgacatcataacatcattatactgttcatttgtactggattttgaatcatttcttccgattatcacagtaacatgaccttgatacgttggttttattataaaaaagcttaaaatagctgaaaatagtacaaagaatattgtcactaaagctatcatagccttttctttattaagcacatcaataaatccagtaaaatctatatcatttccttgttccattaattttccccctgtacataaatcttaagtttgtctatttaaaaaaagtgaaaaaacctttttttctttttagtttttgactcctcgccttaatttcctgattttctataagtaagtctgcattttttacaaatttcccaggcaatacactatcaattttagccaccagcttaagtgctccttcataacctggacatctttttcctgcagaatgtgcatcggaagcaataaagctaaccaagccttcttctattaacttaattgccgttttttgtacagtctttccaaaaagcccttctatacttcctgcatttacctgaaaataaatattttcatcaataaggtcatttattttgtacaaatctctttgaatataagtatacctttcaggatgagctataataggcttaatacctcttatttgaatctcgtacaatatatctgctgcattttctaaaagcgacatcatatcgaattccacaagcatgtaatttgtatctctaatgcagccaattattccattcttatgagcttcaagtgtgtgattatctataaaaacttcctgtccgggtataacttctatatccacagctttctttttaaagatactattcagtttttctgcttcgcttgtaatggcagaaatactgttttcaaatcttcccctgaaatagtgagaagtagctaccattttagttaaacctgcttcatttgctatctccatcattttcaaagtagtttcaagtgaatttgaaccgtcatcaattcctggaattatgtgcgaatgtatatctaccatttaatcacctctttcttttgtaatatttttatttagcaggtatatttacaagtgatgctttaggtgttggctttacatcttcaaatatatattttttcatttgatctgaagttacacctaaatctgtttttagataccaaacattatcaactgtaatgccactacagtatccatccactgggaatctctcttgatcaatagaatctatattcgatgaaagaaacttagctccatactttgcaatatcaagacttcctaaatcagtttcagcataaggaagaagttcatccatcatacttagcatattactttttccttgtgctttcatcttattgaaaactgccataagcacagtcctttgtctttctgtcctctgaaagtctccacccgctgtgtatctaattcttgaataggcaacagcttgtctaccatctaaaagttgtttccctgctgaagaaacatggttgggagtaactttctcatactttgaaacttcatctatatagctgtttagataattaacctcatctggctggacatctacttccactccattaagcttgtctataattttttcaagtccataaaagtcaacagttacataatccttaatatttaaattaaaattttcatttatagtttttatcgccagctgaggaccaccataagcgtaggcatgagttatcttagtcataccatgtccatcaacatttacatatgtatccctcattattgaggataacttaagctttttatgtgttggatccattgttaaaatcataatggaatccgaacgtgatatatcagttttttgacgtctatcaagtccaaaaaatgctatgtttatagtatcatcatacttctgtaattcattttgattcttctgtgttattcctaaatcagaaggtttctttgatatagtcgtttttttcattttacttgtctttgagtaaaagtaacctccagcagttacacctatcactactattaaaataagaattgtaataaaaaactttgacaaaaaaccgaatttctttttagatttcataattacctccttctatgtataaataaacatatttaattagtttatagtaaataacactttaatcagttttatattgttaatgatttttcactaatgaatgaaaataatctagcatataatctactattctttctgatgctcttccatccccatatggatttatagctctactcatcttttcgtattcatctttgttatttattattctgcaagtctcatctacaatatttttaatgtcagttcctactaatttaactgttccagcctcaactgcttctggtctttctgttacatttcttaatacaagtacaggttttccaagatgaggtgcttcttcctgaagcccgcctgaatcagtcataaccataaaacacttattcattaaattatgagtttcctttgtatcaagtggtgggagcaaatgaactctatttatattatttaaatttctgtacacaacatttttaactataggatttaaatgtacaagatagaccaattcaacatcattattttcttctacaattctccttaatgccgtgcatatattctctatacccttgccccaattttcacgtctgtgtgcagttaccataataatctttttatgtttgtagtccaatttatttaattgatcatttttaaatacataattactatccactgtgtatttcatagcatcaatcacagtatttccagttataaatatatttttttcttttacaccttctcttaaaagattatttttagattttactgtcggtgcaaaatgcatatctgcaattgctccagtaagttttctatttacttcttcaggaaaaggaaaatatttatcataagttctaagtccagcctcaacatgcccaatagctatcttttcataaaaggctgcaagtgatgctgcaaacgttgtagttgtatctccatgtactaaaataatatctggtctttcagcagaaaatatttcgcttaacccatgtaaaacacttgaagttatcgttgtaagagattgcttatttttcattatattcaaatcaaagtctggctctatattgaacaaactaagaacttgatctagcatctccctgtgctgtgctgtaacacatacttttgcttgaaaatttttattttctttcagttttttaaccaaaggagccatctttatagcttctggccttgtcccaaatattgaaataactttaattttgctcattcactacatctcccttgcagctattgtcatttgaaagcttactttttatgaagtaaatcattgaaatagttaatgctaattcacccactactgatcctaatattatagaattatatgaaataaactcaacagttcctatatataatataagtgttataattgaagcaatagtaaatgctctactataatacttaccatttccacttcctataagatactgaattccaataaaattatttaaaatacttaaaaatatccatacagacatataagctaatatatgtgaatacattatatatctattgccatacaatatataaattattgttttgttaaacaaaacaattactatacacatgattgttgtaaaaaacattacatatttgctaaacttaataatttcattctttgcttctttatgactatatttaaacaattcacttatatgtgggaatatagcttgagttacaggtgaaaacatactcacaagtgccttaactattttatcaatagcaccataatatcctacaaccttttcatttacaaataaccccaaaataaaagttcctgtagatgttaatatattagttaaaaaagatgtagtaaatatgtaccatccttcttttatatcctttttaattatactagttttgggaatcctaaactttattttaaatctaatctttacaattaatagactaatgattcctattaatatataactgaatgaatttaataaagctacatttaagtaatccttagaagttctaacaaaaataaatataaaaattgtaaacattaccttaccaattacattaactattgttatatacttcattttttcaatcccctgaaaaaaccatactggaaataaaaaattaccaatgatcattccataagtataaatatataccttatagtctgcttgaaaccttttaaaacaaaagactataactaacataactataaaacacaaaatagtcaaagctaacttaattaacataacagaattaaatatttcttcaatttttttcttgtattttttgttcattgaaatttttcttgttgcagataagttaaagccatagtcagttataatttgaaaatatgtaataaatgcagttgcgaatactgtaacaccatacttttctggtcctaaagttcttactagatacggcactgtaattaatggcaatatatagtttaatccttgtaatacaaaaagtgataaaaaattatttattattgtactatatttctttaaaccctttctttccttcacatctactttctccctattcttttatatatcaattcattaagcttctctacccttgcttgccaactattgtctcttgcaaattcaattctcttgtccacataatttccattgtcgtttatagctaagcttaaaatattctcaaactcttcttttgattcataagtatatattaaatctccaaatttttcagtttctttatacctcaatgccacaactgcctttcccatagcaaggtattcgtaaattttaactgggttcactgcttcaattaaatcattttttttaaacagcattacggcaatatctaacttatttaatatatttggaacactataatatggttgcgaacctgtaaatataacatttttaatttctttaaaaccatctatatttatcccttcttcgattggtccaataatataaaaatctagctcttggtgcttttcagccgtattttttaacaattcgaaatcaaaccaattactaattgtacctacatatccaactttcttcttattattgtctttaaatatattaatttcgttaattttttttaatttgcttacactaaaattatctatatcaacaccattatttatcaccacagttttactttttaacttattatcatactctaaaatattcttatataatttttcacttgaaacaacaataatatcacttacttcaataatatatttttcacttttaacaatcttatccttatcacatccagtccaacacttatagtcatccatacaatcatatacaatttccttatttataaaaaagttgtttggtatgatatgcaattgactcggatgtgtgattattattacatcatagttattttctttatccaatttcaacaaataatttttgaataattttacattgattttcttaataactttaaattttctttcttttggtataccttttttccttataattttcatattttcattctttataatagtagttttaccaatatcatcacttcccactttgtctgtaataacgaagttagaatttcttttccatggcattctactaaaataagttacattattacatctacttaagatttctgccatatgatgaggtctttgttttatccaaaaccaatcaaccaaagatatgtatagtatatttttcatttattcacctcttaatctaacttttcttttttaaatagcatcacaaccaacatcccgtatataaaccaattaaaaaacataacctgaaaattttcaaatatttgatatgtaatatcattaataaataaacaaaatacagccgaaaaaagtgtaattataactattttcttttcataattatcttttaatttatttaaacatctaaaaacagacacaaaaactatacaaacaaataagtaataaatcgcagctccaaatattcccaattcaacaaatctttttaatactccactttccgttggaccaatacttacagtatccacaagggcacccgtagatgatatacctatcccatacaagaaattccttctgaataagttaataaagctaatccaataatattttctaagaagattgcttccatctgaattccagtcaaaaatacttttagccctataaattaaataattcaaaacctgattattaacatttcctgtataacttgttaagtaactcaatcctaataatataagtataagaacaaaaaaagctaaaataatcacacaaatctttttatatatagtctgctttcgtcccattatatatatgtaatagataataaaaaatacagaaattgcaatcccagttgcaacaaaaggtcctctagaatttgttgatactatccctaaaatatcaacaaagaaagatattacgaatactatctttaaccttttatatttattactaagcaaaaagtacaaattaagaatagctagttggcctataaatcctcctaatgataaatatgacccattaaatacttttgctctgaccatattaaccccagtaatatatatttcaccaatatcttgattttgattaataatgtattttccagtggaatactcataagctgccaatacagacgtaataaaatttataattaaaagtatagcaaaaatcttttcaatgctttttaaattcagctccttatataatataactatcggaacaaaaaatgatactgaatataatatatactgattaattccaatagccattctagctggatttccaaactcaattccatttgttataacaaatatataatatagaatcataattaaaattaaaacatacaaaatagtactatatctatttttactgaatatacttttcaaaaaatatgtaaatataaatatcacatatacaccaaatattatatattgtattttgctataatctttactaagtatattgttccataattgaagtgacgcaaaatacaaaaaaaatacaactaaataaactttttttatggcaccttccaatctcatcaccttttcattaacgatacttattaaaaaacactatatcaacttaatctaatctatacgttcatctctttatagctcttctctagttttctaatagtttgtaaactttataatgttcatcagctatactttcccatgaaaaatcatttaaattgtttccaactgttgaaaacttattttgaaaaagtaagtcaatcaatccattataaatttccttgtaattatttactctgtcaacaaaatatacatatctttcatccttgtatttattataaacattatctatttgaggttttgttgttattatgcttcttttttcctgtaatgcacatataaaactaccatttttagatgataaaccatctaaaaatggcagaaccataacatcacaagctttaacataatctccaacaacttgtttccttaaatatccagttattaaaacgtctttattcaatcccaaatcaataatcatcttaagtattttattatgatatgcattacttgcatcaagttctgccataatattaaattgaacatctttatatccgctatcctttaaacactttactgctaacagaatattttctatcccttttttattatttacaaatccaaagtaaccaataatttttttcttatcatgaaatagcaatttatttttcagagataagatttcaccataagttttttgggattttggaatattacttcctatatttattttttctattcttaccttattaaataacttcttcttctccaaatccttcttgtatctatcatcaacaactataactaaatcagaaggtaatactcccacatttgttctaatttttccaagtatactgctatcagtatattcatgtagtgtagtaataaccttatatttcttgtgcaaaaaatatggcaatatatttatcatcattccctttttatatgatacagtaggatattgaatatgtactatatcaggacttattccctttattaatttcaacactctacccaattcagtaatattccaactcttaatttcattgtaaattttataatcataactcttatttgcatcatacgatgttattacacttaaatctatatttgaatttttatttaaatgactgcataatatatcactatagtctcctactccacatttaattggtggcaatgcaccagatatcatacatactttcatactcgaatttctcccatgatgttattttttatactgattatggtatactctatcaaatgttttcttttaacatcattaatagcgattgccttaaataattttgcatacaatcttactaagatatataacgtcacagagagcttacatacccaattaaaatttttaaaaacaaaatagtatctgtttctatcataataatagctcataatcaaatctgatttacctgtagttgaagatactttatggtatattttagataaaggtgtatacataattttgaatccagcattttttattctaacattccagtctgtttcttcataatacaaaaagtatttctcatccataaccccacatttttcaattgctcctttactaataagcatcatgcaacctgttacatatcctgttatggagatattattatattgcccttcatcaatttcatttacccctatatgcttagtttttccagtaaatttatttattttaccaccagcataccatatacgatttttatcgtaatagtaatagattttaccaccaactataccaacattcccataattttcatggacctcaagtaatttatctaaaaaatcattttcaactactgtatcattattgagtagtagcacataatcagcattatgtttcattgcatattttatccccaaattatttccacccgcaaaccctaaattcttttttgattctattagtaaacaatcttgtaaaaaagattttattttactaactgaatcattcttagagtcattatcaactataataactttgtaattatgataatttttaatcttccttaaacttttgacacattcaattgtatcttgaaaattgttgtaatttaccaaaattatatatatagatttcataagtaactcccttgtgccatttataattttatattactgtataatctaattactttcttttttaacttgatactggaattaatacaatagtctaatatgtcttcacaaaaattctttatttatttctttgtaaatttctaatgtcttactactagttttattccaactatatttttgaacaaaagtttctttttctttattacaaatatctatactactattttctaatatttttttaatctctcttgccattccttttgaatctagaggattcaccttaactccataatcactcataatttcactcaatgacgatatatcagagataataactttacatccacacacagcagcctctaatggtggtagcccaaatccttcatataatgatggaaacacaaaaacgctagccaaattatacagtagtggtaattcatcctcattaacataacctataaatttaactttctcgagcaaattaaatttgtctaaaatctcacttatagatttatttattgttccgttaattaccaatttaactttgccgtcaataaatctcatagcttttactaatgtttcaacatttttatgtggctttaagttaccgatatataaaataaatctatctggcaacttatatttttcttttattttttttaatttctctgcatcacttatcacatgaaatttaggatcaattccattatacgtgactttaattttatccctatcacactttatccacttaaaaatttcctccttagaaaattcagaaacagttaatatttttttacttttcaacgcacatttctttactatgtatttgtaataatacttatgaaaaggtgtataatattgaggaaattttagatgattcaaatcatgtattgtcataatcatcttacactttataaacgggcttgcaacaaaagaaggcgaatgaaatatagccatatttttatacttattaacaatcataggcaattcaatttgttcaaaaatagataaaaacttagatctcatccttttaaattttatgttattaaattgaccaaagattttacttgcttcttctaaatcattcacgagcagtatcatctccacattatcttcatatgacatatgttttattatttcataagtatatcgagcaatcccatgtagatgcttattaaccatacgcgcatcaattattactcttaaattttgtgtcattatattaccttccatttttttaattttttaaattcatcatatgatctacttaaatattctctaatctttttcttaaatatctcctcatcaaactcttctgcatgtcttcttatgacactcttatcaaaattaattttttcaaattcattgacagcactttttaatgagtcaactgtctgctctttaaaaaatactccagtaactccactaactacagtttctaacgctcctccctttccataagctataaccggccttccacttgcctgagcttcaagaggtgttataccaaaatcctcttctcctggaaatataaaagccctgcatttagagtagtactctttaataacctcatcagactgtcttcctaagaattttatattatcctttgccatattctttaatctatctaaatcttttccaccgcctattacaactaatggtaaacctaattcattaaaaacctctactgctaaatctattcttttatatggaactaacctagacactattaaaaaatactcttcattaacatcacttatatcgaataacttgcaccttacaggaggatgaataacaacactttctcgcttataatgtttccatattctttttgctacattttgagaattagctatataataatcaactctcttagatgaaacaccatcccatagtcttatataattcattacatatttaagaagtttcccttttaacttatttagtccccactcatctgcatattcatagtaatattcccatgcatatctcattggtgtatggcaataacaaacatgcatagtattaggattagtaactactcccttagcacaagaagaacaactactcaaaacaatatcatactcatttaaatcaaaactctcaaaagccattggcataaaaggaagtaacttctgatgccctcttttaatatttttaggcttttgaagaaatgatgttcttacatcaatatttcttaactcatcatctaatttatctggattatataaggaagtatatataggtgcttccttatatatttcttttaaatttataattactctttctgctccacccatattggtaagccagtcatgtactagtgcaaccttcatcaatgcgtacctcaaatctgattattttatcacttttttcttaatctcttttattctctcaatatcatcctttttaccaacaaaaataatgtcatcactttcaactacaaatacatctgaaagtccaacaacaactattggttttttctttccaaccaatatattatttttgctgtctatacttttaatgtcacctacacaaacattattgtcttcatccttatctctgtatctttcaacagcatgccaagttcctatatcatcccagccaaaatcacaaggaattacgtatatgctatctgctttttccattattccgtaatcaactgatatgttatctacctttacatactctctcttaagcaatacattaaactcatcgccattagcttcagatatactccttaatatgttataggttttatttaaatatttttcagtcaacttaaaaattgtagagcacttccatataaacatgcctccattccaaagaaagtttccggctttaacatattcttcagctttttctttgttcggcttttctacaaattcatcaaccttttttatcttaaaaccacttatctcttcttttacttctcctgactttatgtatccatatcctgtttccgctcttgtaggctccattccaagggtaactatagaattatcatttttctctatgaactcctcagccgaccttatagcatctagaagcttgtcctcgtttactattaaatgatcagatggaagcacaacaatagaagcatccttatagtatttgtttattacaaaagcagaaagtgctatacaaggtgctgtatttctaccaacgggttcaactattatatttcttttaggaagcctcggaagctgttcccttaaaatatcaacatatctctcacctgttaccacaaatattttttcaatatcaattaaactttcaagcctttcaacagtcatttgaatcatggttttatcactcaaaagcttcaaaaactgttttggcttttcatctgtagatagcggccaaaaacgttctccttttccacccgccattattagtgcacaaagcatgtgactcctccttacattgcatttttgtctccgaaaagtaaaaaaaacgttctgaatataagcttcaaatcaacaaatgtacttctctcttttatatatttcaaatcaagctcaatccattcctcaaagcctatagagcttctgcccataacctgccaataacaagttaatcccggcttcaccataaactttctcttctgaaactcattaaattcctttacttcattaggtaagttaggtctcggtcctacaagcgacatatgccctcttaaaacattaaagagctgagggagttcatctaaactagtttttcttataaaccttcctacttttgttattcttggatcatcactcattttaaacatggggcctgacatttcatttttatcctgaagtttgcctaaaagcctctctgcattttcaaccatagaacgaaatttatacatattgaatattcttccattttgccctactcttttttgggaaaaaataataggaccctttgagtccaactttattgcaacaattactatgagcataacaggacttaagaatattattcctacaagtgatccaaatacatctataattctttttattataaaatacccaatacccttatcaaggctttcttctggcataaatacaacttttttatcttctaattctaaattctgcaatatatgccccccctgtaattaaaaaacatttaatactttctaaaacatattatacactaactctctaaaaatttcattatttttctgataaattcgttaaaatttgtatatataaccttttaatttcatgtatcagattgttatatgatgaatttatatggttatataccactaattacctaagaatcaatttttatcgaaaatactctgcataaattgtcttaacataaatttcatcacttacaatattgcttttatggtataatctatagaatatagggaggcttgaaaacatgaaaaaaatttttttaattttactttgcattctttgctttagctttatattttataactcctctcaaaatgccaatgtatctaatgatagaagttataggataacaaatgatttaaggaacttttacagaaaactaaagggagaaaatcaaagaagctacactaagcttccaacaaacccgagagatgagaaaataaacatctttataagaaaaaatgcccatgcctttgaatacttcttacttgcttgtgttgtcacaataattatattcagcttaggccttaaaggacggtatgctgttgtttacatatggtttatatgtcttttttatgcggtgcttgatgaatttcatcaattatatgttccaggaagaacatcgcttgtttcagatgttttagtggattttcttggtgcaaatattggcatgtggattagttattttgtttattatgttatattaaagaaatttatcagaaaaaaataaaaaaaaaacaatacccatgtttatagggcaaaagttttataaacatgggtactggttatattatattatttatgactttattatttgtattccttagctttttcttctcctcttaaaactctaagtccaccttctgcaagtgcaagaagttcatcttctccaccatatctaactacaggtgctatgaattttactctatcctctatggcattacatacatgctcgttgtacgcaattccgcctgttaagattattgcatctacatttccttttaaaacggttgaacattttcctatctcttttgctacctggaatgtgaaagcttcatatataagtgcacatttcttatctccttcaagagctttatcaactacagccttaaaatcgatagtatttaagtaactaacaactccgcctttgccgtttatctttttcattacttcttcataagtatatttgttgctgaagcacaatcttacaagatctcctattggaactccaccacttctttctggtgagaatggaccttctccatcaagtgtattattaacttctattactctaccatctttatgagtacctactgaagtacctccacccatgtggactacgattaaattaagatcttcgtatttttttccaacttcttttgcatatcttctagcaactgctttttgatttaatgcatggaatatactttttcttggaatgtcagccattcctgatattcttgaaacttcatcaagctcatccacaacaactggatcaactatgtatgctggaacatttatttcttttgctatttcatttgcaataattccaccaagatttgacgcatgctgaccttgaactcctactttaaggtcttcaagcattttttgatttactgcataagttccacttactattggctttaagagtccgcctcttccaactacagcatttaaagaacttacttctatgtttgcttcttttaacgcatctaaaattacattctttctgaattgaaattgatcaaatatagtgttatatttttctatctcttcagctgaatgtcttaaagtcttctcaaatatctctttttcatcgtcataaataccaattttagttgaggtcgagccaggattgattattagtaatctatacatgttaacattcctccacttaactttaatttatttattgcctgcaactaaagctgcaagtgctatagagttcatttttgtttcatggctgtcagctcttgaagttaaaacaactggtgcagaagttccaactaagattcctccattttttgaatcagttgtatatgttaaagtcttatacattacatttcctgtttctatgtttggcattaagaagatatcagcttttccagcaacttctcctgttactcccttatgatgtgctgcttcttctgataaagctatatcaagtgctaaaggtccgtcaactacacaacctttaatttgtcctctgtcactcatttttgaaagcattgctgcatcaagtgttgatggcattttagggtttataacctcaactgcacaaattggagcaacctttggattttcaattcctattgcatgtgcaaccttaactgaattgtttactatatcaattttttcctttaattcaggataagtattgaaagcaacatctgttaaaaataatagtctatcaaatttctcagtttcaaatactgcaacgtgagacatagtttttcctgttctaagtccaacttctttgtttaatacagatcttaagaaagttgctgtatttacaagtcccttcattaccatatcagcttttccagttgatacaagctctactgcctttaaagcagctttcttaacgttaggctcgtttactatttcaaaatcatttacatccattcctattttaagcgcgattgacacgatttcgtcatggtctccaacaagaatagcatctgcaataccatttttcttagcatctcttactgcttcaagtactggctcgtcttgtgctacagcaacagcaacttttttcatttctttgctctttaccttcatgataatttcattaaaactcttaatcactggtcgtacactcccttttactatttaattatctatgttaaatgattaacgtgctcatttatattttaacaaacttttcacatgaagttaagttttttagaaaattatttatattttatattttctcattatactttctgctgacttaactccatccacagccgctgatattatgcctcctgcaaatcctgccccttcacctgatggatatagtccttttagtgaaatactttcaagcgactcatttctagttatctttaatggagcggatgttctagtctctattccagtcattaccgcgtcagagagcatatatcctgttatttttttatcaaaatttacaagcccctcttttagtgcagctattacataaggtggcaaacactctgataagctcgcaaatttatatcctggagtataagatggttttacgcttcctaatttactgcttactgtatccttcataaaatccccaacaagctgaataggtgcattgtagtttcccccaccagctaaatatgcaagatgttcatagtacctttggaactccatgcctattaacggactattatcgcttatatccttattatagagttcctttgaagctttaaaatcttcactattaaccgttacaacaagagctgcatttgcattttcaagatcccttttataatagctcataccattgcatacaagtctttcatcctctgaagaagacgcaaccacttcaccacccgggcacatgcagaagctgtatacccctcttttatcctttgtagtatgagttaatttataatctgctgctttaagtcttggatgatttttatactttccatattggctttcatttataaaatcctgtggatgctctattctaacgcctattgcaaaaggttttgggtccataaatataccttttttgtgaagcatctcataggtatcccttgaactatgccctatagcaagcacaagacactcacatggaatctcagctccatttacaaccacagcctctatactgtcattttttataattatgtcctcaagcttactattaaatttcacttccccacctagtgatattattctttctcttatgttcttaacaactttttttaatatatctgttcctatgtgtggcttgcctacataacctatctcctcaggtgcaccactttttataaactcttctaaaacatacgtgcatctaggatccttaattctagttgtaagcttaccatctgaaaaagttcctgctcctccttctccaaattgaacattagattctgtattaagtactccagttttccaaaagttatccacagtctccgttcttttttcaacattttctcctctttcaatcacaagtggtgcataaccattttctgcaagagtaagggcagcaaacataccgcatggtcctgtaccaataactattggtctatgctttaacttctcattaccaaactggaacctttcctcttctttgttcttttccaaaatcgcatctttaccatgaatcttggatattattttgctctcatttttgcatttaacctcaacagaatagttgaattttattacatctttttttcttgcatctatagattcccttaatattttaaaactttcaaatgattctttggacaccttaagttttttagccgctttattttttaagttttctaaatcctcatctatatctaaaattatattattaattcttatcacgttatttatttctccttactttgttatagttacatttactttatcaacatcctgagatactttagtaagtcccgaaggaagagttacatttacactttggctgtaattaccttctgctaaattactcaaatctaaatttgcttttatatctccatctttaacattatttatatctgttccataacctgacgcaacaacatctaatgtggtattagaaagctgtgcctttaaatcttgacctaaatttgatgtagttatattcaccttaaaggtcttttgaacagtattgtccgtatctaatctcacatttatactgtcattagaatttgtaagcctaactccctctggaactataagctttacctgaactgtctctcctactgaaatcttagataaatctattggttcagtatctattgaggaaagattatttacattatcacctacacctactatttgtatagtattagtgcttggtgtgatagattttatttttacaccgctaggtgattgcccagtggtctttacatttataccaactgttttactcttctttctttttgtaagcgtcgcatcaatttccttattatctatagcaacatttcctattacatttcccttagcatctacagcttcaagcttaacctttgatacaaaactatcctcatcctcatttttaatatccacaattccctcaacatgatccacatttaaaactatctctgatgcacctgaaacacttacctttgatggtgttggaaaagcatcatatattcctgttaaataattgctttttgcctgctttttgattacaacactaacattttttttaataatcttatcaatttttacattaacccacatattttcttcctgaactatgctaacatttcctggagacttaacaatctctactggaatcttattttcacctttctttacagcataagcgcttatatccgctgctattttaaactcactaggcttaactctatacacatctgtcgcatttccctttattgttacagtaatttgaaatttttgatttggtgccagggcgagattgttatcttttaaaacatctgtgttatttatagttactggaatatttttaatcttataagttttaataggattttcgtaattacttatgtaaagccataaacaaaatgccgctataaaacacattattctaattactatttcttgtttagtctttttctccaccctttcaccttctcccaaaaagtaatttttttagtatatctgtttattattatattcatcaatatatcctttaacttttgaggagtgtaatttctagtcaatcttccatttatcgctaaagatatatttcccgtctcctctgatactattataactaaagcatctgaattctcagatatgcctattcctgccctatgccttgttcctaactttttattaatatcgttatttgcagtaagtggcaaaaaacatcctgctgctgctattctgtcatttcttataattgtagctccatcatgaagcggagtattcacaacaaatatattttcaagtaaagctgctgacaccttagcatctaccctcgtcccggtacctattatatcctctaatcccgtagactgctctactataataagagctccagttttactttcagctaaatttttaacactagtaacaacttcacttaatatcttttccacagtatccttatcttgaagaatgtgaccttcaacaaacgcacttctccctattttttcaagagctcttcttatttcaggttgaaaaattattaccatagaaaaaactccaatagttatggtcctttgaagaatccaatttagcatagtaagatgaaaaatatcacttaaaggtataagtaaaattatcaaaagtacaccctttaatagctgcatagccctcgtttcttttattatgctgtaggttttataaaaaatatatgtaacaactagtatatcaactatggaccacatatttaatcccttaagtgagttctctattatgtctattatatccaaacttttcacctccgtatgtattacaatcccacacttaattatacactaagcaaatgaaattatatattttaaatttataattttttattaataaatgcccaatccacccttgtaaataaaagaatatatatatggatttttacataactatatacataaggagtgatatacatgaagaaaaacttttttaataaaaaaacagcgctattaatggttacgtccatattatcgtgcattcttgtattctttataacctacaatgtatttatcataaattattacagggattatgaaaattccttaaataaaattgcagtttcaattaacggcgcaaacaacatctcaccaacctttgacacagaaaaaacaaaaacccaagctttaaaaagcatcgcatttcttattaaaactcagaagaatttaagcaaattacatcaagtaaacaagtataagtatgtaactcaggatttaaaaataggtttgaacgataatattttagcctataaacagcttattttatgtataaataattcagatgatcccaatttgacctcttctattaatgccttagataagtatagaacttcttgtcttaaaaattacgccagaataaattgtgtaaaaaaagattttctaaaaatagataaattcataactcttatatataattcaaaacactatttttctgaaaaagaagccttaaaaaaatacaatgctgtttctacctctgagttagatgagtttaattcaagttttcctaatttagtatctcagtttaattccatagtaactaattttaattcttatgcagaaaatgctagggataaaaagatatcatatacctctgccttaagaaaagtagaagaaaatgaatcttctcttaataactttgaacagagcctaaattgtctatcaattcctcagagtaaagttgaaattttctgtgcactaaaaaagacagtaaatgattataaatcttacataaattcttttgtacctgctttaacatacgaagaaaattcatctgatacctacttatcaacttctgaaataaataaattatatagtgattccgaatacaaatttagcaaaacagaagaggatcttaaggaatttaacaagctatttaaataataatttacctcttataggactaatttcaatgcttttagattttttatatttaaatgaatttttttcataatcttgtgcataatatcattagcctaaattttaaaaacggggaaaccaatttttggggtgaatcgcataatatatgcgtaggtttgtgcctttaccgaatccgtcagctaacctcgtagaataaaaggaggaagattaatgaaaaaatttatttgggctattatattattcactttaagttggtgctgcctacctaatacctgcagtgcacaaattcttttaaaaccaaaggagggaataccttataatcctttatctattgtaaaagatgataaagttgagaaaaacttatatgatgaaaaagtagattctgttcaagtcttcaatccagatggcaattctatttatatcaccaataatgatattaatttaatggcacaggtggtatatgctgaaagctgttcagaaccatatgaggggaaggttgctgtagcctcagtaattttgaataggcttcaaaatcctgagtttccaaaatccataggtgatgtaattaaacaaaaatatgcattttcatgtattagagatggtaaaatagaggtaacaccaaatcaagaatgttacaatgcagttatggatgctttacatggtaaggatcctacacctaaagccatgtatttttataacccaagaatatcaacatcctcatggatgaataacatacaaaaagaaaacgtaaaagttataggcaaccatgtattttttaaaacatataaagaatagctgatataggtatatcttatatctaaaaaaataagggtgatttttctttcactttactgcaaaaacctttcagtaggccttcagcagtaaaatgaaaaaaatcatccttatgcttttgtatataatttttccacagcattaagtgctgctacttgtccttctccaactgccttcatatattgataaggctttcctgtacagtcacctgcagcataacagccatcaatattagtctccatttttctatttacctttatatgtccatcttcaacataaagaccagggacaagctgctctggaggcgcgctatccttaagtacaaaaactccatcagtttcaagttctcttgattttaatttaagcttttccacttttttgtcgccaacaatttcaacaggaacatccttaacaatctctactgcagaaactagctgatattcatccttataccttggaacatagtatacctttgaagctagttcagctaaatagttagcttcactttcggcttccttattataccccactatggttacaattttacctttgtataaaggagcatcacaagtggcacaatagccaactcctcttcccaaaaatttatcttcaccttttagtggttttgtatgctccattcccatggcaagtataacttttgatgcttcataagtatctttgctggtcattatagaaaaatactctcccattgcatatatgttattaactttaacattttctatttgtatacccatattatctatatgctctttaaacttttcctgaagctcagctcctcttatcccataaaatccgagataattatttattacaggcgccaaggttaattttttacttaaatcactgctgccaaaaacaataacacttttatttcttgtttttgcatttattgcggaagctaaaccagcaggtccacttccgattatagcaatatcatatctttccatcttattacatgtgcttttctatagaagctgtgattgattgcttaggtctaaaacctactaaagtttcaacaggatttccatctttaaatatcataactgtaggtatacttgctattccaaacttacttgctattccaggattctcatctacattaacctttgtaaattttgctttaccatcaagatcttcagataattcatcaattataggtccaagcattttgcaaggtccgcaccatggagcccaaaaatcaactattacaggctctcctgaagtttttatttcttcatcaaaaatagactcattaatttcttttaccattattactcctcctttatacccctatagggtatagtgtacttatattttatcatgcctcaaaataatgtcaatcttttatttatctatattataagcacataaaccttataatataaattttttctaggcatttatcttatttattaattatagcagatatattggagttattataaattgatttagggtaattatttgaaagcttctcagcatatttttttgcaacgtcaatatttacatccttattcataatagctaaattataaagaacagtttcctcataacttcccttttcaaatttttgatcatacatactgtaataattcattgcactttcagcatcattagtatttttataggtttctgcaataaaataaattatatcagaataaagatagtttttttctccatatttatatgcttttaaaagattgtccttcgccccctcataattcttgttttttataaggtctgtacctgccttataaaaatattgaactccatcacctagaagcatatccattgccttagataacaaaatcttatcattaactttaatatttttattatccttccacttttcctcgtaatcataaatcttgttaaaatccttattgttcactgccgtctgaagctcttcagtattaaatacctcttccttttttggtactttaggtttttcaactggcttcttaacttcctttttaacagttttatttggggctgtttttttcattatagtctttttagtctgggttctattatttttaatatagttttttatttcaacggtacctaacaccaaaagaagtattacaacaatagctgccgcaggcttatatacctttttcatattaaaagcaccttttataacacctaaatctattaattcttttctgcttttaagtgccatttcgttatttgcatcaactttaagcaccttttcaatgctttcaatggctttctgatatcttccctgccttatatagcaaatagccttatgattatcaacatttatacaattatatgagctctctgaacacttatctaaaagttccaaggcttcttttatttctacattttttatacgtttaagtgctattatatagtaatttaacctcgcctcatcttctattgtatcttctaaatatttttttgccgatacatctctattagcattcacattaagcttccacactgtcttagcttcatttaaattgcccttaaaatagcacagcattcccttaagatccaatgccgcactattatttatatccattgatatgcattcttcacacaattgaattgctttatctatatgtcctttttcaaaacttaaaagagcttttttgtaaatttttttcgatttatccatttaatatcacctttttgccttatgtattctagtatatatactattgtttatcgtggcaatacaaaatatgtttacagtgtaattaaaattaactaaaaccattctatattttattagtaaaaagcggttatttggcactatccctatatttatgtatattatggtaattttatgtttgaatttcatttttattacatatataataaaatatgtgttacattctgttgtattacaaaaaattaaaagtaaagggtgatttcatgaaaacaaaacgaatttttagtaccttaataatagctgcatttgttttttcatttacaacaactactaataacgtttctgctgatactacaacaccagcaagtacacctcaactagatttaaccgtcacacctaataatgaaggaaattacaatgatttaaaatggaatatgtctggtgcgtctcaagattattcctataagctgtattccaaaaaatcaaccgacacacaatttcaaactatcccttgtaaaggtacaaatacagataaaattcatgtattaaatatttatccggacttaggaaacaaccttaaggggtggatggaaacttctaatacagacgatataaacggatatggaaaaggaattataaaagttgatgaaatcccgctaagtacttttaactctaatcctaatataaaagatagtaatggaaatgagtatgatgttattatgcttggttcatgggatagtaataattctgaaggcttaaatgcgacttcggaagctgtagttgaatcatttataaaaagcggcaaaggtgttctttttggacatgacagcataaatcaaaattattcaaatctagacaattacgcaaacgtaaaattcccatcagatgctaagttatatacaggtgcagcagttggtgatggtagaacaattttgtcacctggttctacaacgtctaatcttactacagtaaaaacaggtttgttagtgaattttccttggaaaattggtaacaacttatctgtacctgtaacacataattctcaaatatcatacggagatatttgggtaagattcactcataaatcttatactgctgatgacatgattaatcctggaaacttctatttaagtacttggaataatacaggagttatacaaacaggacattcgaacggacaagcaacctctgatgaacaaaaattacttgcaaataccttattttatctagcacaagtaacagatcaaacttcttgggatgatcataaaggccaagatgtagatgcaccaagtaaacctgttataaattccgtaactaacgatactttcaaaaatcaaatttccctaaattattcatctacagacaacggaagtacttatgattattatgttgaagcaacaggaaaaaatgatgggacaaaagtagattcagatacaaaaacgggaactgttacaactggtatagccggttattctattgtagtggatcaaaattctgatacaatccctagtaatacaattactacaacttcaacaaattatactttgaataattcatataaaaatgatttttatgtccacattgcagcaatagataaagctggaaatatatcagaagtaactcatcaaaaggtatctgttgataatgctacaaatattgcactaaataaaactactgataatttaactgtgggtgctaatgatactttaactgctactattacacctactgatgcagtagataaaaatgtaacctggacctcaagtgatccttcaattgctactgttgatgcttctggtaaaattacagctgtaaaacctggaactgttactgttactgctactactgataatggtaaaacagcttcctgcaatgttaccgtagaaaataatactgttaatttaactctatttatgcaggactcaactacaagacaatatactataacaaaagatgaattcactaaattcacaaattggtacaatcttagagcaaatggtggtactttctctgactcttacacatttaacttaccagtagatgcctcctcatctgttataagacgtactgtatactttactaccatagaatcttttgaaattatttccgacgatgttcctgtagaagaaagaaacactactttaactttattaatgaaaaattcaactataagaaaatattctttaactacaagtgaagttaataactttaacaattggtatgatcttagatcaaataatcaaactcttcaatcttactatatattcaatgttcctgcagatgatttttcacctgctagaaaagattatgttttatttaataatataacagattctcaagttcagtaaaaaaatacaggaggaaaactatgaataaaagaataaaagtcttctttttagtctttttaattgtaattttaggttgcttcacaaatgttttcgctactaataatagtgacgctattgaaataggtacctctaatctaaatggtactgctgtaaatagcgctaaagttggaaatcaactatttcatccagaagtaggttgggcaagatatgacgatactaatccaaaaatgttatttaaaggatcatttaatgattacccatctaatgtatattacaatggttcaacaaaatatggtattggaactgcactaattaaattttacggttctaaatttagaattttaatgagttataatccagatagaagtaattctaactttgtaactgttgatggtacaaaaataggtcaatttgatcaaataaaaggctctctaatacctcaagctttaggatttcaagaaaataatttaactgaaggtgttcatgttgtacaaattgatttaggaaataattctacactggatgcattcgatatagatgattctggttatctaattcaactagacaaaaatttaaccttaaataaaacatcagaaacattaaccgttggacaaactgatactttatcacaagtagtagttccagataacgctcctgataaatcactaacttggacctcaagtgatccttcaattgccaatgttgatacttttggtaaagttacagctgtaaaagccggctcagctattattactgccactactaatgatggtagcaatttaacctcttcttgtgcggttaatgtaaaagattccaacactacaatatcactaaacaaaactactgataatttaactgtgggtgctaatgatactttaactgctactattacacctactgatgcagtagataaaaatgtaacctggacttcaagtgatccttcaattgctactgttgatgcttctggtaaaattacagctgtaaaacctggaactgttactgttactgctactactgataatggtaaaacagcttcctgcaatgttaccgtagaaaataatactgttaatttaactatatttatgcaggactcaactacaagacagtatactataacaaaagatgaattcactaaattcacaaattggtacaatcttagggcaaatggcggtactttctctgactcttacacatttaacttaccagtagatgcctcctcatctgttataagacgtactgtatactttactaccatagaatcttttgaaattatttccgacgatgttcctgtagaagaaagaaacaatactttaactttactaatgaaaaattcaactataagaaaatattctttaactgcaagtgaagttaataactttaacaattggtatgatcttagatcaaataaccaaactcttcaatcttactatatattcaatgttcctgcagatgatttttcacctgctagaaaagattatattttatttaataatataacagattctcaagttcagtaatataataatcaaagcccttcggggcttatttttgtataaaaaatagagtatctacagagattataaaaatctccataaatactccttgcaaaatataatgcaaaaaactttatataaaatgatttttttaggctttcattatcaattctttagctgttaagattgaagatgcactcattgagaattcatccaagccatactctactagagttggtattgctttttcatctccagccatttctccgcacattccacaccattttccttctttgtgtgcagattgaattgtcattttgattaatttaagtacagcagggtgcattggattgtaaaggtatgaaaccttctcattcattctatctgctgccaaagtgtattgtataagatcgttagttcctatactaaagaaatcaacatatttcgcaagttcttctgaattaacagcagctgctgggatttcaaccatgattcctgtttcaagtttagcgttgtatttctttccttctttatcaagttcgcccatacattctttaagaacttctttagcacttaagaattcttcaagtgaagatatcatagggaacattatttttaagtttccatatacagaagctcttaaaagcgctcttaattgaattttgaagatatcctttcttccaaggcaaagtcttatagctctgtatccaaggaatggattcatttcttctggaagaggtaagtatggaagctttttatctccacctatatctaaagttctaattacaactggtttttcgcccattttttctactacagctttataagcttcaaattgctcatcttctgtaggcatttgatctctatccatgtataagaattctgttctgaaaagacctactccatctccaccgttttgaagaacagcctctacgtctttagcctttcctatattaccgcaaacttcaactctttttccttctttagttcttgtttcaacatttattagttctcttaatttttcttgtttcttttcatattctgcttttttagcttcatactcttttaatgtagcttcatcaggatttattatagcaatcccttctgctccatctactactattgtatctccgttcttaacactttctactatgtcttgaagaccaacaacagctggtatttcaagtgttcttgccattatagcactgtgtgaagttcttccacctatatttgttaagaaacctattactctatttttatcaagttgagctgtatctgatggtgttaaatcatgtgcaactacaactgtgttattatctacatctgcaagagaagtcatatcgtttcctgcaaggttttgtaaaactctatttccaacatcctttacatctgcaattctctcttttacatattcatcttcaatgccttcaaagattgctacataatttttcattacgttttcaagtgctttttcagcattaatcatttcgtctgagattatattttctgctgaaccaataaaatctggatcatcaagaaacatcatatgactttcaaatactgctgctttatcagcacctaaatctttttctgctttttctttgatttttgtgagttgctctcttgctttttcaactgcaccttggagtctagctttttcgctttctatatcacttatctttttttcaactattttaacttcattatcggctttaataaaaacatgtcctatagcatatccttttgaggcagatattcctttttttatcattgttatcctcctatcaaatacattcattattgtataaatatatatagcaattatcatgccaacttgatcaaattactatattacattttttttaattaattaagctttaacacaaaaccttaaagcatcgcctatattaaaggtattcagacatgctattttttatgtctatgtaaattatacctatatatatttaacttatttatgtcgaatttaattttcacaacttgatactttttatcatatatattttattttattggttttatatttattttcaccaaaatttatatagctattcctctattttaggtgtacaatatacttgataaaaattatcatacctttttaggaattttgattatttttatcaataattttaaaataaactactttatcattttaaaatgcattcataagaaaggattgctatgtttaaaaattgtattacagtaaatattaaaaacggagttcacactagaattgcagcaatgatagttcacgaagcatctaagcttaaagaaaaatacggtattaatttatatgtaaagcaaatgaacgctaaagaaccaattgcaataagtatgctggcactactttctcttaaaatcaaagaaaatgaacttgtagaaatttcctgcttcgaagatactacaaatggtcaaagggctgttatagagttgagtaattatataactaaaagcctcggtgagaatattaagtctttttcaaatatagatgcaataattgaagaaagtacattagtcaatgaaaatgtacttgaaaacatacctatgggtattatagtggtagacataaattgcaatataacttctataaatgactacgctcttaacattatggataaaaacattgaaagtgttattggtatgccagtattagatattattccaacttcagatactcctcttgttataaaaactaaagagaaaaagctaggaaaaactcaacacataaacaaacatatagtaatatctaactgctgccctataatctcaaacaataatgttattggcgctttatgtgtatttcaagatatttcagagctggtaggcataaaagagcttaacgaacgctttcaaaaaatactagaaacttcccatgatctaatatgttttatcgacgaaaacagaaaaatctcttacataaatccaacttacgaaaaatgccttaacattaaatcagaggatgtacttggaaaagaccttatgaaaatttcacctgatggatatagaatgaaagtcttcaactcaaaaaagcctattgaaaatgtagtctatactaaaaataatgtaggtatcatatgtacagttgtgccaatttttataggagaaaccttcaaaggtgtaatctcaatttctaaagaagcagatgagattataaaaatggcaaaagagcttgaaaaatcagaggaagaacttaattactataaggatgagcttaaaagacacaataagcttagtgcttcctttaataatataataggcaacagcagctctcttagagatgttcttataacagctgataaggcagcagattcaacttctacagttttgataagaggcgaaagtggtactggtaaagaacttatcgcaaaagctattcataatggaagcccaagaaaggacaagccatttgtaagagttaactgtgctgcaatacctgaaaatttaatagaaagtgaactttttggctatgaaaaaggtgcctttacaggtgctgttaagtctaaacctggaaaattcgctatagcaaatacaggaacaatatttctcgatgaaattggtgatatacctaaatcaatgcaggttaaacttcttagagtacttcaagaacgagaatttgaaagcgttggtggtattgaaacccaaaaggtagatgttagaattatagccgcaactaacagaaaccttgaagaaatgcttaaaactggtgagtttagggaagatttatactatagattaaacgtactttccatatttcttccccctctaaggaaaagaaaagaagatataaatcttttagttgagcactttataaataacataagtaaaaaactcaataaaccggtaaagaaaattgaagaaagttgtctttcatgttttatgaattataactggccgggaaatataagagaacttgaaaatattatagaaagatctataaacatgtgcgacgatggagtaataatgttgaaggacctaccattttatataacaaatattgctcctcaaaacgacattgtaaagattgatgataatagtccacttttaaaattagaagactatgaaaaaataattttaactatcgctatgaaaaaatataaaagctacaataaggttggaaaaattctaggaataactcatagaactgtatctttaaaatgtaaaaagtataatatagatgttcaatagctaattacgggggttttgaaattttcaaacccccgtgattattgtttatcccattattctttcttttaaaacactttcttcatttctatcaaagacctctacatccatgtatgctctgataaaatttctttcctttatgtcttttattacatttgctactctagatgaatcttcatcaataactataaatatcacaggtacttcttctatgatctttataatcttaagaaatactgtagttacaaatttttgcgaaattgtggtacttattttgtcaactgtcgtatcaattgaataattattaccattaatacctacatgatctactgacacaactactactgtcattttatacttatctaaaagaaatctcctcaaagaatttttagtatcattttgttctaatatattattatcacccatagtaattgacgagaagtaacttctctactatactcctttcaaggtttcctgtaactatttcaccactgagtattttattcgtgcacaaatttatccaggtaactttttcttcctatttcataaagattatttccaacggtatcaattataactactgcaggaaattttattactttaagctttcttatagcctcagatcctaaatcactgtaagctataattttagattccactatagattttgaaataagtgcagctgctccccctactgctccaaaatacactgccttatttttaataatagattcaacaacctcctttgaccttgctcctttacctatcatgccctttaaacccatatcaagaagccttggagcaaatgcatccattctaccactagttgtaggaccagcagatcctattaccttccctggttttgcaggtgttggcccagcatagtatataatctgattttgaatatcaataggaagatcttttccctcgtttagaagttctataagtctcttatgcgctgcatctcttgctgtataaatgtatccacttataagcactctatccccagctcttaaatcttgtatttcttcttgtctaattggagaagttattaatttttccataataaaagcctccctaaatttcttcgcttttatgacgagttacatgacaactaatatttacagcaaccggaagacctgctatatgtgttggataggtttctatatttacgccaatagcggtagttcttcctccaaatccttgaggtcctattccaagcttatttattttgtatagcatttcttcttctatttctttataaaactcgtcttcattatgtacatctataggccttataagtgcttttttagctaaaaacgcggctttctcaaaagtacctccaatgccaactccaaccaccataggtgggcatggattaggtccagcctcttcaacagtatccaaaataaatttttttacaccttcaattccctctgcaggcttaagcatctttattttactcatattttcagagccaaacccctttggtgctaatgttacctttattttatcacctttaactatattataatgtattattgctggagtattgtcattggtatttacccttcttaaaggatctttaactaccgactttcttaaataaccttcgttatatccttgtcttacaccttcatttacagcgtcctcaattaactctcctattacatgaacctcttgtcctatatccaaaaaaacacatgccataccagtatcctgacatattggtacattttcgtcataagatatatcgatattttcttttatattatttagcacatcttttgctatatcccattcttcttcttcataatacttatttattttttcttttatatcttgtggtaaataatagttcgtctctatgcataatttctttaccacttctgttattacttttgaatctatttctcgcatatacaacaccttctcaaattttattatacccataagataaaacaaaataaagacatatcaagcctttattttgaaatagtacatattctatttattaaaaaattcatttaatgattgttcaatagtatctgctaacttttgctgatagcctccatctttgagcttagcagcttcatcgggattagaaagaaatccacattctataataacagacggaacttctccgctatttcttaatactctgtaatcattaattgaaaccttttcttttcgtttattatttttattaaggttttctttaaaattactctgaagtatacctgctagttttttacttgcatcattgttagcataccaaacctgcgctccattgtactgcgactgcggaaacatgtttagatgaatgcttaaaaaaacatcacactttgaagtactcttaagtttgcatctgttatttaaatcctcttcttttttctttcttatggtactagtattttcggaataaagtcctttatcttcttctcttgtcataacaaccttatattttttttcaaggtttttcttaagttttaatcctattgcaaggtttatatccttttccaaagtaccatcctttaaattagcaccgccatcaatacctccatgccctggatctatcagtataattttttttcccgtttttgcatttacattgttaggcattactgaaaatacaaaagttacagctataaaaacgctgaaaacttttataaacaccttaaaaaaattatctctttttaacatactattatctccttaacactgtttaattttatatatatttttggcaaaaaaactaaaaatattcgctttaaaactaaaatgttaaggagtttcgtatattttaatatgcatttaacattgcatagattgatattaacttctatgtactataatattatcaagttatcttataaaaagtgctaataatgctgcaatacccgcacatactggcatagttataatccatgctataagaatatcctttgcaaccatccatcttactgaggatattcttttagatgcggcaacacccattattgatgttgaaattatttgtgttgtacttactggagcatggaacatggtagctgaaaatattacagcggctgcacctgtttctgcagcaaatccatttacaggcgctaatttagccatattcatacccatagtttttataattctatagcctccaaaggatgtaccaaatgccattgcaattgcacatgctgctttaacccatgccggcacagtaaaggagctaagaagaccagaactcataagtgccattgttattacacccattgatttttgtgcatcatttccaccatgatttaaagccataagcatagctgatacaatttgtgctttagagaatactctgcttacaaatgcgggtttagagcgatgaaatagccactcaattaatatcataaatatatatccaacaacaaaacctattacaggtgataaaaataaccaaagtactattttattaaagaatccaatccaatttacaacaccaaagctagtcttatacattactgctgcaccaataagtccacctataagtgcatgagaagagctacttggtattcccaaataccatgtaattaagttccatataatcgctgcaataagtgcaactattataacactaggtactattttagaaggatctattataccatctccaacagttttagctaccttatcactcatgaatgctcctaaaaaattcaaaatagcagacataataactgcagatttcatgcttaaaactcttgttgaaactgatgttgctatagcgttagcactatcgtgaaaaccattaagaaaatcgaatgatatagccaaaattacaataataattgttataagcacagcagaattaagcattcttcatagcaactccttctataacattagctaatgtttcgcatgcatctaaagttctttccatatattgatatatctctctccactttattacatgaagaaaatctttcggatcagtgtattctgtgaataagattcttactgctcttctgaaattcaagtccccttcttcttctattttatttaaatttactatacattcctgcaattttttactttttttcatgttcttaaattcagtcattaaggttataatttcttcagctgctttaacaactaattctgcaagaaatttagcttcttctgtagtgttatgaacatcaaacattacaaatctactgctacttgcttccataaggtcaataatatcatccataagtgtagcgacactgtaaatatcttctctgtcaaatggggttacaaaagttttatttaattcgtttataatattatgctgctgatgatcgcctttgtgttccatatcttttataactttcaatttgttctcgctatcttctggattatttacataatctctaaataataaagaagtttcatagatagtatttgagttttcaataaaaaggtcaaaaaatttatcatcttttggggataaactaaacataatactcctcctacaatatttatattttttatttagtaatttaaacattataacctaaagctttaatctcatttttaacccctataaaccaacaacataacccataatattatatcatactgcaataaaatatagaagataaaataatcatcctattatttacttatgtaatcactatatatatatattactaaattaacaaaaaggtggaattaccacctctccttttaatctttgaatttcaccaattttttagtttataggtatgttcaagaggacctgaaccctttcctaaatcaagtcctgctctaagtgcccctgtcaaatattcttttgcatttttaatactttcgctaatacttatgccctgtgctaaattacaagcaatagccgacgatagagtacaccctgttccatgtgtattaggattatctattttctctaatttaaaccactcaatatatccatttttataaaataaatcagttgcattatccactaagtgcccacctttaattaaaattcctacattaattttttcagaaattttctttgctgctcttaccatatcctgttcacttttaattttaaagccgcagagcacttcagcttcaggtatatttggagttattaaagttccaagcggcaaaagacatgttataagtttttccatagcttgatcagataatagtttgcttccactagtagctaccataacaggatcaattactatattttctgctttatattccctaagcttttttactataacattaatgatttcaccactagataccatccctatctttactgcatctggacaaatatcagtaaatatgcactcaagctgtttttcaacaaattctggagtcgcttccatgattccataaactcctgttgtattttgtgcagttaatgctgtaatggcactcattgcatacattttatgtgctgtaatggtcttgatgtcagcttgaatacctgctccaccactacagtctgaacccgcaatagttaatatctttttaatcaacttcaaaacctcatttccttacataattttaatagctttcataccttgcagcatcatctaatttatcaccatctaaattaaaaacttcatcgataatataatttctgtaagaagaattgccatcccttttagacagtctgttatatgcaagctctccacaaatccccatagcacaaaccgaagctaaggttgcttctaatggactatcaacattcgcacttatatatgctgctgtcattgcgcttaacatgcaacctgtaccagtaattttactcatattaggattaccattccttacaacatacgccttgctttcattagctataatatcaatggctcctgtaattgcaatcacagcacccgtttttttagaaaatcctttagcaaaattaattacattatctaatgtatcatcttttactttatcattgacatcagcatctacacctttagttataccttgacccaaggcaagtacctttatctcagagatatttccacgaataacagtgaatttaacctcctcaagcaattttaaagcagtttgacgtctaagttttgaagcacccactcccacaggatctaaaataactggatgctttaacttattcgccatttttccagctttaagcattgactcaatagtattttcattaagagtacctatattaatattaagccctctgcaaatggatgtaatctcctctacctccccaatatcatctgccataatcggtgaagccccgcaggcaagaagaatatttgcacaatcattaacagtaacataatttgttatattatgtatcaaaggatttgtccctctcacattttcaagtctttccttaagcatttttcatccctccaaaaattgtatttttaatatataaattacttttccttaaaataaaaaagagaataccctttggcattctctccagtaaatcaagtaacctatttcctacgttggcattatccaaatcaggtatatggatcgaagttcaattacttcctctcagcctgaaaacaagctcccctgaaaaatattaagttatacctatttaattaaataaaaggatgctgctagtgataacaacatccttttaacatttcccacaacttttgaaacactacaaattgtaagctttctattaatccatatgtaatatagactatctctttgagaattgtggtgctcttcttgcctttttaagaccgtatttctttctttccttcattcttggatctcttgttaagaatcctgcttttttaagttcaccttttaaagtttcatcagcctttaataaagctcttgaaattccgtgtcttatagctcctgcctggcctgtgaatccaccaccatgtacattaactaaaacatcgaattttcctttagttcctgtaagatttaaaggttgattaactataaatcttaaagtttcaagtccaaaataatcttctgcacttctcttatttattacaactttaccttcaccaggtacaagtctaactctagctactgcttcttttcttcttcctgttcccatatattgtacttttgccattttaaatcctccttccggcgtttaattaatatttcaactctaaaacttcaggtttttgagcttcattattatgctcttcgcctttatatacttttaatttcttaatcatttttcttcctaatacaccgcttggaagcattcttctaactgcttcatagaatacgaagtcagctttcttagcaattgcatctttatatgacatttcctttaatccacctggatataaagtatggtgtctaaacattttttgatctgctttttttcctgttaaaagaactttttctgcatttaaaactattacgtaatctccagtatcaacatttggagtgtatattggcttattttttcctcttaaaattgaagctatttgacttgcagctcttccaagtggcttacctgcaacatcaataacataccattttctttcgatttcctgtggtttcgctaagtacgatttcatggtttttcctccttcaacaaatctgtttctattctacgagtttcttctatgtctaagatccggggctagtggatcttttaatcatttaacaaacatttaaattatactataacctggcagtcatgtcaataatcacgctcactataatataatttaatacataactttttcaagacataaccccttagctggaacgactcttcctgcttttgtcctatcctttgattctacaatagttttcacatttagaggagttatcttttcttctcctacttctaaaagtgttcctactattattctcaccatattgtacaaaaaaccatcacccgtaacataaaaaattactttattctcatcctctacgattctggcttcatatatggttctaatattagacttaactttactgcccgtgctcttaaatgatgtgaagtcatgagttcccaaaatatatttagttgcctcacgcataagatcacaatttaatttatgcccatattgataaacataatttctgtcaatagctgctctttgtagtctatttaaaatggtgtagctataagtttttcctttgttatcaaaacgtgaatgaaaatccattggtacttcctcagaattgagagctactatatcatctggcaatactgaatttagtacgagataaaacttctcaggcggtataactgtgtttgtcttaaaattgcatgtataggcttttgcgtgaactccagagtcagttctgctacaaccaataacatcaattttctctcctgttatttcacctattattttctctacctcttcttgaacagtaacaacattcttttgcttttgccatccacaatagttagtaccatcatattctaatgtcaatttaacatttttcataataacacctatttataagtaattgcttaaaactgaaactccaactaaaactacactgaaaaatactgctacacaatcccgtgaggtaaattttaactgcttcattcttgttcttccttctccgcctctatagcatcttgattccattgccattgcaagctcatctgctcttctaaatgagcttataaataaaggtacaagtataggtataagacttttggctttctttattatgtttccagaatcaatgtctgcacctcttgccatttgtgccttcattattttatccgtttcatctattaaagtaggtataaatctgagagctattgtcatcatcattgcaaattcatgtgctggaagtcctatttttgaaaatggggtcaacaatttctcaattccatctgtgagctcaattggtgaggtcgtgtatgtaagcatagacgtacctattatgagaaatattaatcttatagacataaatgctgctaaaacgagcccttccttgtatatatgtataaagctccaatgaaataagggtgccgcagctcctggtgtcataaagatatttaatgccccagtaaatattataagcaataatataggctttaagcttttatagatatatttcattttaataccagatataaaaattataaaaagcgtaaaagctgttataaaaatatatcctttaaatttatctattaaaaacaaattaactatataaacaagagacagtaaaatttttgttctaggatccagtttatgaatgaatgattttccaggtatatactgtcctatcgttatatccttaatcatctcttagcactctccaatactctaagaatttccttttttgctgcttcaatcgtaaatatatccttagatatatcgaagcctttttctctaagcttcctgacaaggtaagtaaccttaggaacagcaagacctactttttcaagtgtatctatttcattgaaaacctcatccaaatttccacttaatatacatcttgaatcatacatgacaaaaatcttatcagctacttttgcaacatcttccatgctatgggatacaagaattatggtcatcttatattctttctgaagcttttttatttcatagagaatatcatctctcccctttggatcaagaccagctgtcggttcatccagtattaaaaccttaggctccatggcaactactccagcaatagcaactcttcttttctgaccaccacttaattcaaagggtgatttatctttaaagtcattatactcgagtccaaccattttcatcgccttttttactcttgtagaaacctcttcttcacttaatcccatatttctaggaccaaacgctatatctttttctattgtctcctcaaagagctgatattcaggatattgaaatacaagtccaaccttttttcttatatcattaagtttaactgatttatccgttatatccacatcatcaataaaaatacttccagaagtgggttttaaaagtccattaatctgttgaatcaaagttgattttccagagcctgtatgacctataaatactgcaaattcaccatcctcaattgtaatatttacattatcaagtgctttcttttcaaaaggtgtcccaggcatataagtatatgttaaattttctattttaatcggcataattcattcaccatctcatctattgtaagtatatcatctttaacattaataccttctttttttagttcatatgcaagttctgtcatttgaggtacatcaagtcctatttccttcattgtctttacatctttgaaaacttctcttggaactccactttttataacttttcctttatccattactactattctatctgcattaatcgcttcttccatataatgtgttattaaaattatagttatatgagaatttttatttaaatccattatagtatttacaacttcttctcttccttttgggtcaagcatagcagtggactcatcaaatacaatacatttaggatgcatagctaaaacaccagcaatagctaccctttgcttttgaccaccagataataaatgaggttcatgctttctgtactcatacattccaacactcttaagagcattatctactctttcccttatctctgatggtttaacacctaaattttcaggtccaaatgcaacatcctcttcaacaattgtagctactatttggttgtccggattttgaaataccatacctgtcttacttcttatggtccatacatcttcttcatttgaagtatcaagcccttcaactattacctttccatcagtaggcaccaaaagggcatttaaatgtttagcaagtgttgacttaccagaaccatttcttcctaatataactaaaaattctccttcatttacctctaaggtaacatcattaactgcagtggtattcttagattcgtcttcatttttgtactgatatactacatttttacattccaccattttattatacatacgaacacctctacttgcaaagcagtttatttatttattaaaatagggactaagctagcttaatccctttaaattagtaactacactaattctagtataacaatttctgctccgtcgcctcttcttggtcccattttgtagattctagtgtatccaccgtttctctcgctgtactttggagcaacttcatcaaataattttttaacaactgtttcttctgttacaaagctaagaacttgtcttctagcatgtaaatctcctctctttgcaagagtgatcattttttctgctaaacttctagtttcttttgctcttgttacagtagtctctattttaccatgctttaaaaaactagtaactagatttctaagcattgctcttctttggtcagtaggacgacctaatttacgataacctgatgccatgcctatacctccttactttaactattcatcatttaactttaatgataatcctaaagctttaagtttctgttcaacttcttctaaagattttcttccaaggtttctaactttcatcatatcttccatggatctttgagttaattcttgaacagtgtttattcctgctctctttaagcaattataacttctaactgaaagatcaagttcttcgatagtcatctcaagaaccttttccttcttatcttcttctttttctaccattatctccacatcatctgcatgatctgtaagagtcataaataatttaaaatgctctataagtatctttgctgccaaactaattgcttcttctggtcttatagtaccatttccccatacttctatggtgagtttgtcgtaatcagttatttgagcaactcttgtattttcaacagtgaaattcactcttttgattggagaatatattgaatcaactgctattgttcctataggcatgtcatctcttttattcttattctgagtaacataacctctgcctctgttaacttcaatttccatatatagctttccatcttcatcgagagttgctatatgtaaatccttattgataacttctacagatccatcagttcttatatcagcgcctgtaacctctccaggtccatgtgcatctatatatattactttagaatcttcaccttccattttgaggcataaagctttaatgttaagtatcaattctgtaacgtcttcttttactcctttaacagttgaaaactcatgaagtactccctcaattctcactgaattagcggcaactcctggtaaagatgaaagaagtattcttcttaatgaattgcccagggtaattccatatcctctttcaagaggttctacaacaaacctgccataagaaccatcttctgtagactcaacacattctattttaggtttttctatttccaacatatctataaccctccttaaaaataaaatggcaacctatattgagggtaactgaatacagtcaaattacttactatataactcaacgatcaatgtctctttaattggagtatctatatcctctctatttggctctgcaactattttcgcttcaaaattatcatagtttgcttcaatccatgctggtaaagtctttggattttctgcaaaagtcttgaatttttcagttcctctactcttctcactaacagatactacttcattaacttttaatgtatatgaaggtatatctactttctttccatttacaaggaaatgtccgtgagtaactaattgtcttgcttcttttcttgagctaccatagcctaatttgtaagccacgttatcaagtcttaattccaaaagcttaagtaggttttcacctgatattcctttaattctttcagctcttttatagtatattctaaattgtttttcaagaactccatatattctttttgctttttgtttttctcttaattgtaatccgtagtttgaaattttctttctgctctgtccatgtactcctggtgcataacctcttcttgtaaatgcacatttatctgtatagcatctatcacccttaaggaataatttcaaaccttctcttctgcataatctgcatacagctccagtatatctagccattaaatattcacacctcctatatttctattaaactcttcttctttttggtggtctgcagccattgtgtggtattggagtaacatcttttattaatgtaacctctaatcctgcagcctgtaatgatcttattgcagcttctcttcctgatcctggtccttttacaaacacatcaacactcttaagtccgtgttccattgctgttttagcagctgtttcagcagccatttgagcagcaaaaggagtgctttttcttgatcctttaaatcctaatccacctgcacttgaccatgataaagcatttccattaacatcagttatagtaactatagaattgttaaaagttgatttaatatgtgcacaaccgtgctctatattttttttctcttttcttcttctagttttcttatttttctgtacagccatacttttctccttccctccttatcttatactattttttcttcttagaagcaactgccttctttggaccttttcttgttcttgcatttgttttagttttttgtcctctaactggaagtcctcttctatgtctgattcctctgtagcatccaatttcaactaatctctttatatttaaagctacttctcttcttaaatcaccttcgattttgaagttcttgttaatgtaatctcttaatgcattaacttcttcttcagttaaatccttaactctagtttcaggattaacacttgtagcttttataatttttcttgaacttgttagtcctataccatatatataagttagacctatttcaactcttttttcttttggtaggtcaataccggctattctcgccattgacatttacacctcctggttttgtatatatttattatttatattataaagttttaggcaacaaagtgtttaacctttttgttggcagccgtcctaaaacacatattaactttattaaccctgtttttgcttatgcttaggattttcgcatataaccattactttgccttttctttttatgaccttgcatttttcgcaaattggtttaactgatggtcttactttcatggttaaccctccttattactttgccctccaggtgattcttccacgagttaaatcatatggtgaaagctcaactgttactttatctccgggcaatattcttataaagttcattctaagtttacctgaaatatgagccaagatcttttgaccactttcaagttcaacttcaaacattgcattaggtaacgattctaaaaccgtaccctgcatctcaattacatcttcttttgacataaggtaatcaaacctccttactggtacatactgactcaagaaattttctgatggctgaattacttatgggataattggatttgagctcagctcttacatcctcacaaaccatatctgtaatggaaaggtgcttcagcttttttttcttaggtttttcaacttttctcaaatcaccatcagaaatatatacatatttatcatcaattactccaacaattataaaacaaccatctttatctcttccggcttttgaataaactaccttaccaagataattttcattcatatattcacctcgttattcacacaaagtcagtatttcaggtccgttatccaatatagcaactgtattttcataatgagcagctaaactaccatcttgagttactacagtccaatcgttactctgtgttttcaccatataagttccaacatcaaccattggctcaattgccaacaccattccgtgaacaagttttggtcctctacctggtctaccgtaattcggcacctctggatcttcgtgcatttcttttcctattccatgaccaacataatctctaactacaccgtatccaaaactttctacatactcctgaatagagtgtgatatatctgtaagtctatttccgataacagccttttctacgcccttaaaaaagctctctttagtcactttaataagctttgcagcttcctctgatatctctccaatagcaaaagtcctagcagcatccccttggtatccgtttaaaatagcaccacaatctacacttataatatcaccttcatgtagaaccctatgcttagatggtataccatgaataacttcttcatttattgatgtacatattgatgctggaaaaccaccatatcctttaaatgaaggaattgcattgtatttcttaataaaatcttcagctaatctatctaaatctgcagttgttacacctggctttgcagccttttcaagcatgttgagtgtttccccaactatttttccagcttgcctcatatactcaatttcagtgtcgtttttaattataatcatctatatctctcctaagacatttcttatatcctcaaaaactttatctatatcctgagtaccatcaactgatttaagaactgcttcatttctataatatactacaagtggctcagtctgtctatcataaacatctaatctctctttaactgtatcctctgaatcatcttttctttgaaccacaggactaccacagagatcacatataccttccactttagtaggattatattcaatgtgataactagctccacatttactacaaactcttcttcctgtcattctgttaaatattttttctcttggaacgtctattaacaatgcacaatcaattttttcttttctgcctacaagaaatttatcaagggcttctgcttgatttactgttcttggaaagccatctagtaaaaatccacttttgcaatcatctttagatattctatccttaactatatctatagttaattcatctggaactagaagacctttatccatatatcctttagccttcattccaagttctgtttttccacttatattagctctaaatatatcacctgttgatatgtgaggaatagagaattcactgcttattaactttgcctgagttccttttcctgcacctggaggacctaataaaattattttcatctaatcatcccaatctacatattattcatttaaaaatccatgataatgtctcatagtcaattgtgactgcatgatccttagattttctagtgcaactcctactacaatcaataatccagtacttgcaaaatgtatgccttgaaatgaaccgttggcttcaactatcataggtgctatagctataacggaagcaaataatccacctaaaattgacactttatcaagcactctttctataaatctagttgtaggttcacctggtcttattcctggaataaaacctgaagatttatggatgttttcagacatttcttctggcttaaatgttatttgagtataaaaccatgtaaagaacaatattaatacaaggtacaataacatataaggtattgtattttgcttaaatggactatactcgcttccagttaaaaatttagtaatttttgctgtaggccaaaattgagaaattgttgtaggaaacatcataactgatatagcaaatattatagctataatacatgatgcattcatattaataggaatatgagaagattgctttcttgcaacttttcctccaactgcctttccagcatactgtacgggtatccttctttctgccaagcttgctataacaactcctacaaataatacgcaagctataacagcaactacaacaatttcaactatattcacagtatcagccgattgtaacttaactatattataaatagtagatggaaatctagatataatatttacaaatattataagtgatgcaccatttcctattcctttgtcagttatctgatcgcctaaccacattaagaatgttgaagcggctgtaagtgttaatattattaagaacacacttaacttagaattagtttgcattgctccagcacttcttattactgcataaaatgtaagtgattgaagtgcagccaaaggaaccgaaatataccttgtgattttctgtatcttctttcttccttcttcaccttcctttgaaagttgttcaagtgaaggtatagctactgtcaataactgcattataatagatgcattaatatatggaataacacccattgcaaatatactaaattgactaaaagctcctcctgtcatcatattataaagtccgaaaagagagcctgattggtttgttaaattcaatatttttgatgtgtctactccagaaacgggaatataatttcccattctgaaaattagaaccatcgcaattgtaaataacattctttttcttaattctggaactttccaagcattacgtaaggttgataacatttatatcacctcagcttttcccccagctgcctctattttttcagctgctgatttggaatatttattaactttaactactaatttctttttgagttctccgttacctaaaatcttaactccatcgttaacttttttaattattcctttttctatcagcgcatcaattgttacttctgttccatcttcaaaaatatttaatctatctacgtttactgctgtaattgttttagcaaatatatttgtaaatcctcttttaggtaatcttctatataatggcatctgaccaccttcaaatcctggtcttactccgccaccacttcttgcgttttggcctttttctccttttcctgcgtttcttcctaagccagaaccagtacctcttccaactcttttaggagcttttcttgatcctgctgcaggtttcaattcatgaagtttcataatttgcacctcctcgtttatctttattttacctctaaaagataatcaactttttttatcatacctctaatttgaggagtatcttcatgctctactgtacgacctattttcttaagtccaagagcattaactgtagctatatgatctttttttcttccaattaaactcttttttaatgttattgaaattttagccatttcttactcctcctatcctaaaatttcttcaacagtttttcctcttaaggctgctatttgttcaacagtccttaatcttgataaaccattaattgttgcgttaaccatatttcttgggttatttgaacctaatgatttggctcttacatcatttaatccagctaattcaagcacggctctaactggaccaccagctataactcctgttccttctgatgcaggcattattaaaactcttcctgtaccaaattctccatatatttcatgaggaactgttgttccaacaattgcaacttcaactaagttctttttagcatcttctatgccttttcttatagcttctggtatttcagctgattttccagtaccaacgccaacgtggccattttcatctccaacaactactaatgcagtgaatctgaagtttctaccacctttaacaaccttagctactctgtttatgaatacaaccttttctttaagatctaatgtgctaggatctattctcattgatttccctccttttttcagatattagaactctaatcctgcttctcttgctgcttcagcaagttctttgattcttccgtgatatatgtatccacctctatcaaaaacaacctgctttattcctttatctaaagcctttttagcaacgattcctcctacaagtttagcagcttctttattacttccagccttagctgagaaatctttatctaaagttgatgctgaaactaatgtagtaccgttcacatcatcaataacctgtgcatatatatttttttcacttctatatacagcaagtcttggtctttcaggagtaccagaaattttattacgtactctcaagtgacgtctttttcttgattgaaccttgtttaacactatcctttcactcccttcttactacttaccagttttgccttccttacgtcttataacttcatcgctatatttaattcctttacccttatatggttcaggttttctaaatgttcttatatcagctgctacggatcctactaattctttattaattccttttacaacaactgtatttgcatctggaatttcaaaagttactccttcaatacttgcaacttctattggatgtgaatatccaagatttaatattaagcttttacccttaagttgtgctttataaccaacaccaactaattgtaatgtttttgaaaaaccttctgtaacacctataaccatgttatttattaacgcccttgttaatccatgaagtgctttgtgatttttgctatcactaggtcttgtaaccacaactttattatcttcaactgcaattttcatatctttatgcatagccttttctaattgaccctttgtgccctttacagtaacaacgttgtctggtgttactgtaactgttacaccactaggtatctcaactggctgtttacctactctcgacatttaaaaatacacctcctgtttccttactaccaaacgtagcaaagtacttcgccgcctaatcctaatttcctagcttctttatcagtaactattcctttagatgtggatataattgctattccaagtccgtttaatactttaggaatttcttcctttctgcaataaactcttaatcctggttttgatattctctttaaaccagtaactattctttcttttccttttccatatttcatggataatcttaacattggtacaactccgtcattgtactcctctatatcttttaagtaaccttcctgaagcaatatgtttgccattgccttcttaatttttgaagaaggtagctcaactactccatgtctaacaacattagcatttcttatacgagttagtaaatctgctattggatctgtcataaccatattttgtgcctcctttcaatcaataattcaactaccagcttgcttttctgcatccaggtatttcacctttatatgcaagttctctaaaacaaatacggcaaattccatatttttttagcacactatgtggtcttccgcatattttgcatcttgtataagctcttgttgaatacttaggttcttttttccacttttctatcaaagctttacgtgccatatttttccctccttattattgagcaaatggcataccaaggaatcttaacaattctcttgcttcttcatctgtcttcgcgtttgtaacaaagattacatccatacctctaactttatctatcttatcatactctacttctgggaatattaattgctcttttattcctaatgcgtagtttcctcttccatcaaaagatttacttgatactcctctgaaatctctaactctaggtaaagctacattcattaatttgtctgcaaattcaaacattttattctttcttaatgtaaccttgcaacctataggcatattctctcttattttaaaattagctactgatttttttgctcttgttaatataggcttttgacctgaaattaattgcatatcagcaacagctgattctaaaactttctgattttccttagcttctccaacgcccatgtttataacaatcttttcaagctttggaacttccattatatttttatattgaaatttttccattaaagctggaataacttctttttcgtatttttctttaagtcttggaaccattaagtgtacctcctttcagaatttaaaatgtttctccacactttttgcatactctaacttttgttccgtcatcaagtacttttttacttattcttgtagcagtcttgcactttgtgcagtataacattacttttgcactatttattggagcttcttttttaattaagccgccctgcatattctctttgttagctttttgatgtttaactactacgttaacatctttaattaaaacagttccctttttaggattaactgctaatacttctccaatttttcctctatctttaccagatataacaacaaccgaatcctgttttctcacatgaattttatttgccattaaagccacctccctattatagaacttcaggtgctaatgataatattttgttaaaatctttatctcttaactccctggcaaccggtccaaaaatacgagttcctcttggctgtttatcgtcttttattaaaactgctgcattctcgtcaaattttatatatgaaccgtcagctcttcttaaaccctttgcggatcttactacaactgccttaacaacttcaccctttttaacaacaccacctggtgttgcacttttaacgctagcaactattatatcaccaatgtttccccattttctcttggaaccacctaatactctaacacacattatttccttagctccagaattatctgcaacctttaacattgtttgtgcttgtatcatctaaatatcctcctttctggacaaattatttagccttttcaactatttctacaagtctccatcttttatctttagacaatggccttgtttccattatttgtactctatcattaagtttagcttcatttttctcatcatgagctttaaatttagttgtcttatttacagtttttccgtataaaggatgacgaacttttgtctctactgcaacaactattgttttatccattttatcggatacaactctaccaattcttgtctttctgtttcctctttccaaaatataagcctcctttcaactattaatcctcacacgcctttaattcttcttctctaaggatggttttaatttgggctattgattttttaacttcctttattctcataggattttctagctgaccagtagccaactgaaatctcaaagtaaataattctgtctttaaatcatttaattgtaaatttaattcttcaggtgctttttctcttagttctttagccttcatttgcttcaccacccatttcttcaaagtccttcctagttacgaacttagtttttataggaagtttatgtgatgcaagtctaaatgcttctcttgcttgctcttcggtaacatcagacatttcaaacaatactcttcctggtttaactactgctacccaatattctggagaacccttaccagatcccatacgggtttcagctggtttttgagttactggtttatcagggaaaatctttatccaaagttttcctccccttttaacgtatctatttatagctattctggcagcttctatttggttacttgttatccaagcacactcagtagcttgaattgcaaaatcaccatatgcgataaagttacctcttgtagccttacctttcattctaccacgctgaaccttacgatgtttaactcttttaggcattaacataacgtattcctcctcccttatgcgttagcttcttcctttttttcaatttttttagtgggaagaatttcaccattataaacccatacttttactcctatttttccataagtagtatcggcttctgcaaatccataatcaatatcagctcttaatgtttgaagtggaattgtaccttcatgatactgttcagttcttgctatttcagctccagcaagtcttccagcacaagcagttttgactcctttagctcctgttctcatagctcgctgtattgtttgtttcatagctcttctgaaagatattcttctttcaagttgttgtgctatattttcagccataagctgtgcatttgcatcactatttttaacttctactatgttgataagaacattttctttgtcaacaaaattaactaaatctttctttaaagcttctattccttgaccacctttacctataaccattccaggtttagcagtgtgtatattaagcttaactctttttgctgctctttctatttcaattctagaaactccagcacttgaaagtttatttttaacaaattttcttatcttgttatcctgtactagatatgacgaaaagtttttactatttgcataccattttgcgttccactctttaataacgccgactcttaaaccgtgcggattaactttctgacccaatatatttccctccttcttaatctctttcttttacaatcactgttatgtgacttgatcttttctttatactgaatgctctaccctgtgcatgaggttgaaatcttttcaatgtaggtccctgacctgcatatgcttctgaaacatataatctgtttccatctaaattaaaattattttcagcatttgctactgcagattttagcactttgtttataacaactgcagcatctttaggtgtatattgtaatatagcaaaagcttcatttacattttttcctcttattaaatcaagaacgattttaactttcattggggacattctaacgtatttagctatagctttagcctccataaaaactgcctcctttcacttactacttaactgatgttgtcttttctgtatttccgtgacctctgaatgttcttgtaagaacaaattctcctagtttgtgtcctaccatatcttcacttatataaacaggaacatgttttcttccatcatgaacagctatagtatgacctatcatttctgggaaaatagttgaacttctggaccaagtttttacaactttcttatctccagccttattcatttcaactattttgttgagtaaagattcttttacaaaaggtcccttttttattgatctactcactttgttggcctcccttcataaacctatataaataatagtaggaagagaacttaatattctcttcaaaactacttatcatttcttctcttaacaataagtttgtcagaatacttcttattttttctagtcttgtaacccaatgctggtttaccccatggtgtaactggacctggacgaccaactggtgatttaccttctccaccaccgtgtggatggtcattagggttcatgacagaacctcttactgtaggtcttattcccatatgtctctttcttccagccttaccgatgttaacaatgtcatgtgttaaatttgatacagtaccaattgtagctctgcattcaattctaacatatctcatttctccacttggaagtcttaactgtgcatagtttccttctttagccataagctgtgctgatgaaccagccgctcttactaattgtgcaccctttcctgctgctaattctacattatgaattactgtaccaacaggtatattttttattggaagtgcattaccaatttttatatctgcatctggacctgatacaacagtatccccaactgataatttagtaggagcaattatgtatctcttttctccgtcagcatatactactaaagctatataagctgatctatttggatcatactctattgtagtaaccttagctggaactccatctttatttcttttgaaatctattaacctgtacttgtttctgtttccgccacctctatgacgaactgttatcttaccattattatttcttcctgctttgttatttaaagaaactaacagtgatttttccggtacatcagtagttatttcttcaaatgtagatactgtcatctgtcttcttgcaggagaagtaggcttaaagcctctaactgccatttatattcctcctttttttcagcttttctggcattataccaataactgcttttttattgcattccttcaaagaactcgattgctttgctatcttcagttaatttaactatagcttttttgtaatccgctcttttaccaacatgcactccaactctctttgtttttccgagtatgtttgaagtatttaccttctcaactttcactccaaaaacttcttcgattgcttttttaatttgtactttgtttgcatgtggatctactataaaggtgtattttttatctgccatttcagccatacttttttcagttataacaggttttctaattatatcatggctatttgtatacattatgcatacacctcctcaatctttgatacagcttccttagttactatgaacttatcatatttcaatatgtcatagacatttaagttattagctggtattactgcagcaccttgtatatttctaactgatttgtatacattttgatcagattcagcaacaactataagtgctttctttgcttcaaatgcattaagcattttaactatttctttagtttttggtgcatctatctttaattcatcaagtacgatcatttctttatcattaaccttacttgtaagagctgatagcattgcagttcttctcattgattttggaattgagattctgtaatctctaggctttggtgcaaatacaactccaccatgaatccattgtggtgctcttattgaaccctgtcttgctctaccagttcctttttgtctccaaggttttattccacctccagaaacttctgttctagttttagcactttgtgttccttgtcttttatttgcaagctgtgcaactactacttggtgaagtgcactttcgctaattttagctccaaaaactttttcagacaattcgatgtcttcaactttcttaccttctttattgaatacttctactgtaggcattctgcatcctcctttcctaaaaaactaagctttaactgaattttttataactacaaatgatttgtttggtccaggaactccgccctttattaatataaggttcttttcaggaataacctttgcaacttcaacatttaatactgttgtgtttacatggcccatatgtcctggcatttttttgcttttaaaagttcttgatggatctgatgatcctcccattgaaccaactgctctatggaattttgatccgtgagacataggtcctctatgtgctccccatcttcttattgtaccttggaatcccttaccttttgaaactcctgatacatcaactttttctcctgccgcaaatatatcagcctttatttcagcaccaacttcatagctgcttgtatcttctaatctgaattcttttacaaatctttttagttcaacatttccttttgcaaagtgtccttttaaaggcttattaacaagtttttcccttatagttccgaatccaacctgtatagcatcatatccttctttttctgaagttttcttctgaattactacacatggacctgcttctataactgttacaggaacaacttttccttcttcattaaatatttgtgtcataccaagtttttttcctagtataccttttttcatcatcgcacctcctaaacgtattagcggattgcttagcaatcataaccgtttataactaaatattaaagttttatttcaatatcaacgccagctggtaaatctaatctcattaaagcatcaacagtttttggtgatggacttattatatctataagtcttttatgagttctgatttcaaactgctctctagaatccttatatttatgtggggatctaagtattgttacaacatccttttctgttggtagaggtactggacctgctactttagctcctgttgtttttgcagtttcaacaattttttcagctgattgatctaatattgtatgatcaaaagcttttaatcttattcttattttttgctttgccaattcatttccctccttttcatcgcacgtctaaacttaatacgtacaacaacgggcattctgtaaactgtacctggtgtttcatatatgtacacacatgacataaaattacggaataaccgtcgcccggttcaagaccgtgacatactcggcaagaattccccgtaagtccggctacctcttgcttcatcgccattttcacataacaactcttatattatacacctgatttaatgtttttgcaataacttattgttaaattaatataaaaaataggaagagcgtcctctccctatttttactgtcatttattactctattatactagtaacaactcctgatccaactgttcttccgccttctctgatagcgaatcttaagttgtctcccattgctacttttgttattaattcaactgtcatatctatgtggtctcctggcattaccatttctactccatctggtaactggattgatcctgttacgtctgttgttctgaaatagaattgtggtctatatccattgaagaatggtgtatgtcttccgccttcttctttctttaatacgtatacttgacctacgaatttattatgtggagttattgaacctggttttgctaatacctgacctctttcgatgtcttctctctgtactcctcttaataatgctccgatgttatctcctgctaatgcactatcaagtatttttctgaacatttctacgcctgttactactacttttgttatttcatctttcattccaacgatttctacttcgtctccaacttttaatgttccagtttcaactcttcctgttgcaactgttcctcttcctgttattgtgaagacatcttcgattggcattaagaatgctttatctgttggtctttctggtgttgggatgtatgcatctacttctgccattaagtcttttattggttttattgcttctgcatcatctggattctgtaatgcttttaacgcacttcctactacgattggtgtatcatcgcctgggaatccatattcgtttaataactctcttacttccatttctactaagtcgattaattctggatcatctacttggtctgctttatttaagaatactactatatattcaacaccaactcttgatgccaatagtatgtgctctcttgtttgtggcattggaccatctgctgcacttactactaggattgctccatccatttgcgctgctcctgtaatcatgttctttacatagtcagcatgtcctgggcagtcaacgtgagcatagtgtctattctctgtttcatactcaacgtgtgctgtgttgattgttattcctctttctttttcctctggtgctttatcaatctcttcgtaattgaatgcttttgcttttccttcttttgctaatattgttgttattgctgctgttaatgttgttttaccgtgatctacgtgtcctattgttcctatgtttacatgtggtttcgttctttcaaatttttcctttgccatttttatttcctcctaacaatatatatattctattttttttctccaattattttttcttggatatttttaggtacttcttcattatgatcgaactgcatagtaaatactcctctaccttgagttcttgatctaagtgaagttgcataaccaaacatctctgaaagtggaacaaatgctcttataacttctgctcctgctctctgctccattccttcaattcttcctcttcttgaattaacatctcccattatatctcccatgtactcttctggaactgttacttcaactttcattattggctctaatataactggatcagctttagtcatagcatttttaaatgccatagaaccagctattttaaatgccatttctgaggaatcgacatcatggtaagaaccatcaactaacctaactttaaaattaactgtaggatatcctgctatgataccacttaaagatgcttcttgtataccattatcaataggctgtatatattcttttggtacagctccaccaactatagcattttcaaattcgtattcgccttcagttggagtcatttcaataacagcgtgaccgtactgtccacgacctcctgactgtcttacgaacttaccttctgccttaaccggttttcttatagtttctttataagcaacctgaggcttaccaacattacattcaactttaaattctctttgaagtctgtcaacaattatttcaagatgcaattctcccatacctgctataattgtctgaccagtttcttgattagtataagttttaaatgttggatcttcttctgcaagtttagcaagtgctatacccattttttcctgactagctttagtttttggctcaatagcaacctctataactggatcagggaattccattttttcaagaataattggattgtcttcggaactaagagtatcacctgtagttgttaatttcaaaccaactatagcacctaattctccagcttcaagttcttcaacttcttgtctgtggttagagtgcatttttacaagtcttccaattctctctttctttccttttgttgaatttaaaacgtagcttccagctttcataacaccagagtaaactctagtaaacgcaagcttaccaacaaatggatctgttgcaattttgaatgctaatgcagctaaaggctcactatcatcagcttttctttcatcatcatttccatcttcatctactcctttaactggaggtatatctaatggtgatggtaaatattcaacaacagcatcaagcatctgctgaacacctttattcttatatgaagatccgcatgttactggaactatttcattcgcaataacaccttttcttaatgctgcgttaatttcttctacggagatttcttctccctctaagtacttattcattaattcttcgtctaattcaacaatagcttcaatcatttcagatctatatttttcagctaattccttcatatctgcaggaatttcttgttcttccatagtagttcctaaatcatctgtatatactattgcttcatttcttattaaatcaattagaccaaggaaattatcttctttacctataggtatttgtataggtactgcatttgcactaagtctatctctcatcatttgaactgatctatagaagtcagcacctaagatatccatcttatttatatacgccattcttggaacgttatatttttccgcctgtctccatacggtttcagattgtggttcaacaccaccctttgcatcaaatacagcaactgctccatcaagaactctaagagatctctcaacctcaactgtgaaatctacgtgtcctggtgtatcaattatattaatttcatgatccttccaataacaagttgttgctgcagaggttattgttatacctctttcttgttcttgaaccatccagtccattgtagctgcaccttcatgaacttcaccaattttatgagtctttcctgtataaaataatatacgctctgtagttgtggtctttccggcatcaatgtgtgccattattcctatgttacgaaatttttccaaaggatattttctagccactattttttcctcctctcattaaacaaactaaatctgacaaaactgctttggttaagaaaaccaaaacagtttcataaagtatataaaaactttattagtcactatcattaaaaataatgataattatcagttaaagtgtaataaacttcaacttaaaaacataagtttttattagtatctataatgtgcaaatgctttattagcttctgccattttatgagtatcttctcttttcttaactgcagcacctgtgttatttgaagcatctaataattctccagctaactttaagtgcatatatttttcgcctcttttatctgctgctgcaagcatccatcttattccaagagtctgtcttctttcaggtcttacttctattggtacctgataagtagctcctccgattcttcttgcttttacctcaagcaaaggcattacattattcattgcagcttcaaatacttccataggttctttgccagttttttcttttaaatactcaaaagcgttgtagcaaattttttgtgctacacctttttttccatcttccattatgttgtttattaattttgtaacaaccttactgttgtataatggatctggtaatacatctcttttagctatatgtccttttcttggcacttttcttccctccttaacaattttaatttaagttcataggtactcggttataaaaccgcaaagtgctttgctcctgcaaattttatagctattctaataaagcatataaactcaatttagatgaataaataatactcaatatatctatataaatgccgaagacatagcactactaaatacgataactatttttgctttggctttttagcaccgtatttagacctagcttgttttctatcagcaacacctgctgcatccaaagttcctcttacaatatggtatctaacacctggtaaatccttaactcttcctcctcttatgaggacaacactatgttcttgaaggttatgacctactcctgggatataagcagttacttcatatccatttgttaatctaactctggctatttttcttaatgctgagttaggctttttaggagttgttgtctttacgactgtacatactcctctcttttgaggacactcttttaatgctggtgcagttgactttgctgctaatgtctttctgccttttcttactaattgacttattgttggcatgttttcacctcctgtttataatcatatcaatctattaaaaattttacttaatagcacattaatttacacaaatatgtaatttcagcacaacattacttcaaaactacagcagttgaagcttcaacatcaatattacataatttgcctaattccttcatagtatctacatatactatttgtagagaatgttcatttgccaatttttcaacagtttgaaacaactcactttctgcatctttagctatataaaccatttgagcttttttctcatttatagctttaagagactgtttcatgcctactactttattcttcggcaacctgtttaccataaactgatcctccttaatatttaattgtagaggcaaagtaatagcttacctctacaatatattacaatattaattattgttcattctgaaaactacacgcagtttctattttagcatctatgaattgctatgtcaataaaatgctctttaaccttcaattttatcttctgctataaaattttcatcatcagcgtttgtttcagtaaccaatggatctatttctatgttcttgtatctattcattcctgttcctgctggaattagctttcctatagttacattttcctttaatccaacaagaggatctgattttccttttattgctgcatctgttaaaactcttgtagtttcttggaatgatgctgctgataagaacgaatcagtagctagtgctgcttttgttataccaagcaatgatactctggcttgagcaggtcttccaccattctcttctacttttttgttttcatccctaaaatcaaatatatcaatcatagttcctggaagtaattcagtatcacctgagtcctctactttaacttttctcgtcatctgcctaattacaacttcaagatgcttatcgtttatatcaacaccctgtagtctatacaccttctgaacctcagaaagcaagtaatttttaacagcatttactccctttattctgataatatcatgaggatttacagaaccctctgtgatttcatctccagcacctatagtctcaccatttttaacttttagactagaaccaaatggtatatcataacttacttcttctccactttcagtagctataaatactattctctttttcttagtctcttctattcttactgtaccagatacttcacttacaattgcaagtcccttaggttttcttgcctcaaacaattcctcaactcttggaagaccttgagttatatctgatcctgcaactccacctgtatggaatgttctcattgtaagctgtgtaccaggctctccaattgactgtgctgctactataccaaccgcttctcccatgcttatcttttcagcagttgccatatccattccataacattttgcgcaaactccatatttacaattacatgtaaatacagatcttatttttactttcttaactccaactttttctattcttatagccttatcttcatctatatattcattttgctttacaagaacttctttacttgtaggatctattatatcttctgatgtatatcttcctattaatctttcagataagctttcaattacttcgtttccttcttttatttcagaaacttcaaaaccctctgttgctccacaatcttcatttcttactataacgtcttggcttacatcaacaagtcttcttgtaaggtatcctgaatcggctgttttaagagcagtatccgcattaccttttctagctccatgtgttgagataaagtactctaatacgtcgagaccttctctgaaggaagcttttataggaagctctattatcttaccagaaggatttgccataagtcctctcattccagcaagctgtttaatctgactctttgaacctctggctccagaatcagccatcatgaagataggattaaatctgtcaagattatccataagggcatctgcaactttttcagttgttttagtccatgtggatattactctttcatatctttcatcatcggatatgaatcctcttctatacatcttttctattttttcaactgctgtttctgcctcagacatgagctctcctttattaggtggtacagtcatatcagaagttgaaactgttatagcacttattgttgaataatgatatccttttgcttttatcttatcaagcataatactagttttagtaggtccatgctttctatagcatttatctattattccacctaaattcttcttaccaacaaggaagttgatttcaagaagtaattcatttccggcaatacttctatctataaatcctaaatcttgaggtatagattcgttgaaaataagttttccaatggtagtttctattattccacttaccatttttccatctatttctttttctaatcttacttttattttagcatgtatatcaatctctccaagttgatatgccattagtgcttcatcaacattagtaaaggcttttccttcacccttaactccatccttatctattgtaaggtagtatgatccaagtaccatatcctgagtaggtacgcaaactggcttaccatctgaaggctttaatatattatgtgctgcaagcataagaaatcttgactctgcttgagcttcaaccgatagcggtacgtgaacagccatctggtctccatcaaaatctgcgttatatgctgtacatgcaagtggatgaagttttattgcccttccttctactaatataggttggaatgcttgaattccaagtctatgtagtgtaggggcacggtttaacattactggatgatcagaaataacttcttcaagtacatcccacacttgattctgaactctttcaaccattctctttgcactctttatattatgtgcagctcctgtttcaacaagttttttcattacaaaaggcttaaataattcaagtgccatctcttttggaagtccacactgatacatttttaaatctggtccaacaactataacagaacgtcctgaatagtcaacacgttttccaagtaagttttgtctaaaccttccttgcttacccttaagcatgtcagataatgattttaatggtctatttccaggtcctgttacaggtcttcctcttctaccattatctataagagcatcaacagcttcttgaagcattcttttttcatttcttactattatatctggtgctccaagatctaataattttttcaatctattatttctatttataactcttctatataaatcatttaaatcagaagtagcaaatcttccaccatccaattgaaccataggtcttaagtcaggaggtattacaggtattacatccattatcatccactctggcttattagtggattttctgaatgactcaactacttcaagtcttcttataattcttacctttttttgtcctgtacttgttttcaagttttccttaagttcttctgataattgattcaagtctatttcttgaagtaacttcttaattgactctgcacccattccagcttcaaatgattcttcgccatacttatcagctgcttctctatactctttctcatttaaaagctgctttttaagtaaaggagtttctttaggatctaaaacaagataagatgcaaaatacaatactttctccaaagctcttggagacatatcaagtataagtcccatacgtgatggtatacctttaaagtaccatatatgagatactggggctgccagttctatatgccccattctctcacgtctaacctttgatttagttacttctactccacatcgatcgcaaactatacccttatatctaactcttttatattttccgcagtgacattcccaatcctttattggtccaaatattctttcacagaacagaccgtctttttcaggttttaatgtcctatagtttatagtttctggtttttttacttcccctctggaccactctcttatcttttcaggtgaagccaatcctatttgcaatgcatcaaatttatttaattccaagggtacgtcctcccttcataattaatgttcatcattgaaatcttcaagccctaatccatttttcagatcatctatatctaaatcttcataatcgatatctacatcttcattttcatagccagcatctacattttctccgctgacattttcttgaacatcttgtggccttattggttccactttagaatcttcattaccctctatattaacatccaaatcttcagtttcatcttctattgattcttttaattctatttcattgttattatcagataacactttaacatcaaggcataatgcttgtagctctttaataagaaccttaaatgcttccggtattcctggttcaggtatattttcacctttaactatagcctcatatgttttaactcttccaacaacatcatcagattttactgtaagtatttcttggagtgtatgtgcagcaccataagcttcaagtgcccaaacttccatttctccaaatctctgaccaccaaattgagctttaccacccaatggctgttgtgttactaacgagtacggaccagttgatctagcatgaatcttatcatcaactagatgggcaagtttaagtatatacatataccctactgtaactctattatcaaaagcctctccggttctaccatcatatagtacagtcttaccgtcttcagcatatcctgctctcttaaggcattcaactatctctggctccaatgctccatcaaatactggtgtagcaatatgccatcctagattagcagcagcccagccaagatgaacttccaaaacctgacctatattcatacgagaaggaactccaagtgggttaagacatatttgaagaggtcttccgtctggtaagaaaggcatatcttcttcaggtaatactcttgaaataacacccttattaccatgtcttcctgacattttatctccgacagatatttttcttttctgcgcaatataacatcttacaagctcatttacaccaggaggtaattcatcaccattttcccttgtgaatatttttacatcaactattattccagcttctccatgtggaactctaagagatgtatctcttacttcccttgctttttcaccaaatattgctcttaaaagtctttcttctgctgtaagttcagtttcaccctttggtgtaacctttccaacaagtatgtcacctgatctaacttcagcacctattcttattattcctctttcgtcaatatccttaagagcatcctcaccaacgtttggtatatctctagttatttcctcaggtcctagctttgtatctctagcttctgcttcatactcttctatatggatagaagtaaacacatcatcacgaacaagctgctctgatataagcatagcatcctcgtagttgtatccttcccatgttatgaatcccattcttatgtttctaccaagtgcaatctctcctaaatcagttgactgtccatctgctaaaacagttcccttctcaaccttttcattcttttctacaataggtctttgatttatgcacgtaccttggtttgatcttttaaacttaagaagtctgtatgtgtcaactccgccatcactatcacgtcttactcttacttcatttgcacttacatactcaacaactccggcatttctagccttaggtagaattcctgaatctaccgctgctttatgctctataccagtaccaactacaggcgcttgaggtttcaaaagtggaacagcctgacgttgcatgtttgatcccataagggcacggctggcatcgtcattttcaaggaaaggaatcatagcagttgcgacagataccatctgccttgctgaaacatccattaaatcaacttcatttgcaggaacaactaaaacttcatctggagctcttacagttatctttttatctataaaatatccattttcatctaaagcttcattagctcttgctattaaacaacgatcttcttcatccgctgtaatataatgaatttcatcagttactcttccttgctccttatctacagttctataaggagtttctacaaagccatactcatttacctttgcatatgttgcaagtgagtttataagtcctatattaggtccttctggtgtctctatagggcacattcttccataatgagagtgatgaacgtctcttacttcaaatcctgctctttctctcgaaagtcctccaggtcctaacgcagacaatcttctcttatgtgtaagctctgatagaggattaatctgatccatgaactgagaaagctgtgaacttccaaagaactctttaattgatgcagccactggtcttatgtttataagagcttgtggagttataacttcttgatcttgaatagtcattctctctttaactactctttccattcttgaaagaccaattctaaattgattttgaagcaattcaccaacagatctaactcttctatttccaagatgatctatatcatctacattaccaattccgtaagctaatcctaactcatagcttactgttgcaaacatatcatctttgataatatgttttggaactaacttatgaacattcttcttaagctgttcttttatcgcttcttcatctgtatagttctccaaaatttctttgagaacaggataatatactagctctctaatatttaaatcgcttatgtcaaactttatgtaactttttatatcaacaaaattattaccaataactcttattatattgtcgtcaactgaaatatcaactgaatttatacctgaattttgaatttctaacgctttttctttacttattctttgacctttttctacaataatttcacctgtttcagggttcacaatatccttggcagctgttttattagctattcttatgctaactgctaatttcttattgaatttgtatcttccaaccctagataagtcatatcttttaggatcaaaaaacaaagaatttataagagaaaatgcactatcaacggttggtggttcaccaggtctaagtctcttatatatttcaagaagagcctcttctctagttttagtgttgtctttctctatagtagccttaagtctttcttcttctccaaaataattaactatttcggcatcagaaccaaatcccattgcccttacaagtatagtaattggcaacttccttgtcttatctattctaacatggataacgctgtttgaatcagtttcatactctaaccacgcccccctgttagggattactgttgctgaaaataatttcttaccatttttgtctactatataatcgtagtaagctcctggtgatctaacaagctgacttacaataactctttctgcaccatttattataaatgttccctgctctgtcattaaaggaaaatcacccataaatacttcttgttcttttacttcaccagtttctttattaagtaatcttactttaaccttaagtggtgccgcataagtggtgtctctttctttacattcctcaacggaatatttgatattatccatatcgagcttgtaaccaataaattctagtatgagatttcctgtataatcttgaattggattaatgtcatcaaatatctcttgaagcccattgtctaaaaaccactgatatgaatccaactgtacctcaataagattaggcattaccccaatttcatcgagtttagaaaaactcattctagttcttttaccaacttggacaggatgtatcattagccttcaccccttgtataaactaaaataaccaaaaatgcactacaataaagtacacttttggattgcgtacattaaacaactatttctttattataaccatttaattaataaaaatacaattaatattattatataattaaacattccattgcatttcgttattttaccataaataatttgaattgtcaacacccttttcaagccatttttatatgttttaatttatttacagtaaaacatctctatatagtttttttagatatcgcagaaactataatttatataaaaactttatatttcaactatttttatcataataatataaaaatagattttatattaagattctacgtcatgtatattaagtcctaaaaaagcaccccgaaaggagtgcttttaacaaatatcttgctgtaaaatcttattttaattctacttttccgcctgcttcttctattttagctttcatgctttcagcttcttctttagctacgccttctttaatagtcttaggagctccatcaactaaagctttagcgtcttttaatccaagaccagttaattctctaacaacttttataacttgtaatttcttagcacctgcttctgcaagtacaacgtcaaattcagttttttcttcaccagctgctgcacctgctgcacctgctgcgcctgctactgctactggagctgcagcgctaacaccgaactcttcctcacatgcttttactaattcatttaattctaaaactgacataccttttatagcttctataatttcttctcttgtcatttttatggcacctccaaaattttttatcattctaattattttttatttgtattaagcttgttcttctgcttcctttttatctttaattgcacttaaaagataagcgaaatttgataaaggagctttgaaacttccaagtaattttgcaataagcacttcttttgctggaacagaagcaagttctttaactttattaacgtcaaatacttctccttgaacatatcctgcaactaattctaatgccttatgagttttagcaaaatcgtttattattcttgctggagctgttgggtcatcataactcatagctatagctattggtccttctaaatattgagcaattccttcgtatcctaattcatttattgcacgtactgctaatgaatttttgtatactctatattcaacaccagcttctcttaaagcttttctaagctctgtgtcttcctcaacatttaaaccttggtacttaaccattatcatagcttcggtttttcccatcttttcttttatctctgctactttttgttcttttaattgtctattcttatttaccacttcaataaacacctcctcagtaaaaactgactctttataataaactaaaggcccctccgcagacgtacgaagagaccatatactttcatatatattggaatcctcggtaggttggttatccgttacgctcacgcacctactttctacggagtatttacatatttaataatactataaaattgaaactaatctaacactttaacaggatttatctttattccaggacccattgtgcttgataaagctactgattttacatattgtcctttagctgaagctggtttagcttttactattgcatccattaatgcatggaaattttgttttaacttttctgcaccaaatgaactttttcctactggaacgtgaacaatagcagttttatctactctatattcaactttaccagctttgatttctgttaatgcttttgctacgtcaaatgtaacagtacctgatttaggatttggcattaaaccttttggtccaagaactcttcctaatcttcctactacacccatcatatcaggagtagctacaacaacatcaaagtcaaaccaattttcactttgtatttttgttgctaattcttctgctcctacataatcagcacctgctgcttctgcttctttagctttatcgcctttagcaaaaactaaaactcttacttttttaccagttccattaggtaaaataacaacacctcttacttgttgatctgcatgtcttggatctactccaagccttacagcaagttctactgtctcatcaaatttagccttagatgttttcacaactaaatctactgcttcatctggagcataaagagtgtttttatctactaattttgcactttcgatatacttcttgcccatttttaatcctcctttgtggtaataacggttttacctcccactattttaaaaactaatctactacttctacacccatgcttctagctgttccagctatcatgctcattgcagcttctaaagatgctgcattcaaatctggcattttagtttgagcaatttccttaacttgttctttagttattttaccaactttattcttgttaggaacgcctgaaccactttcaataccagctgctttctttatcaaaactgctgcaggaggagtcttaagtatgaaactaaaagatctatcctgataaactgtaattacaactggaatagtaaatccagcttgattagcagttttagcattgtattctttacagaatgccatgatatttacaccatgctgtcctaatgctggaccaactggtggtgctggagttgcttttcctgcaggtaattgtagttttattaaacctactactttctttgccatgaaacttacacctcctataaggtattacccttactaatctagtttttctatttgattaaaatcaagctcaacaggagtttccctgccaaacatattaactaagccttttaatttgcctttttctaaattgatttcttggatgagagctacttgatccataagtggaccagaaataacttttacattttcaccaacaacaatatctatgctagctactttttcccttatgcccattgatttaacttcatcatcagtcaaaggaacaggttttgatcctgggccaacaaatccagtacatcctcttgtattcctaacaacataccatgattcatcagtcattaccatttttataaggacataacttggaaatacttttttcaaagttacttttttctttccatccttttcttcaacttcctcttgaagtggaacttgaatatccataattagattttgcaaatttctgttttcaatggttttttcaatgtttgcttttactttattctcataaccggaatatgtatgtacaacataccatttagctttttcactcataattttatggaacagaatttttttctgaacccataacctcccttacatcttacttaaagatcaccctaaagaggttattaaaaccataatccattattgctaccactataatatacgcagcacaaaaagtgagtaccgctattgtggtttttttaagatccaattttgaaggccaagtaatcctatgagtttcagccccaagatccttaaaaaatccaacaaaaccttttaatggtgatttttccacatttctattttttacattagcagccatttttattcacatcctatttatgaaattacggcccgatatgctattttgtctctttatgaagtgtatgtttgtggcaaaatggacaatattttttcatttctaatctatctggatcatttttcttatttttcattgtgttgtaatttctctgtctgcactcagtacaagctagtgttagttttactctcacaatctacacctcccaatttttaagaaaatttcctatgccttgctaaaatacgcactacctcaatatattatcacaattattacagcgtgtcaaacacatatcaaggactcattagtttttttctactttatttttataattaactttatcctacttaaagggactgggtctgtcacccagtccgcttacacatgtaggaaaacaacttctcttttattactctattatactagtaacaactcctgatccaactgttcttccgccttctctgatagcgaatcttaagttgtctcccattgctacttttgttattaattcaactgtcatatctatgtggtctcctggcattaccatttctactccatctggtaactggattgatcctgttacgtctgttgttctgaaatagaattgtggtctatatccattgaagaatggtgtatgtcttccgccttcttctttctttaatacgtatacttgacctacgaatttattatgtggagttattgaacctggttttgctaatacctgacctctttcgatgtcttctctctgtactcctcttaataatgctccgatgttatctcctgctaatgcactatcaagtatttttctgaacatttctacgcctgttactactacttttgttatttcatctttcattccaacgatttctacttcgtctccaacttttaatgttccagtttcaactcttcctgttgcaactgttcctcttcctgttattgtgaagacatcttcgattggcattaagaatgctttatctgttggtctttctggtgttgggatgtatgcatctacttctgccattaagtcttttattggttttattgcttctgcatcatctggattctgtaatgcttttaacgcacttcctactacgattggtgtatcatcgcctgggaatccatattcgtttaataactctcttacttccatttctactaagtcgattaattctggatcatctacttggtctgctttatttaagaatactactatatattcaacaccaactcttgatgccaatagtatgtgctctcttgtttgtggcattggaccatctgctgcacttactactaggattgctccatccatttgcgctgctcctgtaatcatgttctttacatagtcagcatgtcctgggcagtcaacgtgagcatagtgtctattctctgtttcatactcaacgtgtgctgtgttgattgttattcctctttctttttcctctggtgctttatcaatctcttcgtaattgaatgcttttgcttttccttcttttgctaatattgttgttattgctgctgttaatgttgttttaccgtgatctacgtgtcctattgttcctatgtttacatgtggtttcgttctttcaaatttttcctttgccatttttggttcctccttaatacttatggtaaacaattaatatttattgtattacaccacaattagtaatgtattaaaaatttttattatagaacaccattatctatatgcataattagcattatgtatataactacaagcaaacactaaaaacatgacgaaacttagtccattcatgtaaactgttcctggtgtgttctatgcaataagttttggagcccacgaccagatttgaactggcgacctccaccttaccaaggtgacgctctacctactgagccacatgggcaactttattggagcgggaaacgggtatcgaacccgcggcacccagcttgggaagctagtgctctaccactgagctattcccgcacactcttataatgctcaaagttatgagctatataccaattattaattttactatcaacaattttctttgtcaatatattttatcttttttccaaacacttttccaattttcttttaactctttgaagtgcattatctattgatttagaacatctgtccaaatcttttgcaatttcttgatacgattttccctctaaataagactctaaaacctctatttctaagctagaaagtaccttaagcatattttttcttatctttgctacttcttctttgcttataataagttcttctggatcagatacttcgacgcttgatactacatcaaataatgttctatcagaatcttcatcatatatcggcttgttcaaagaaacatatgtattaagcggtatatgcttttgtcttgttgctgtctttattgccgtaattatctgtctagttatgcagatttctgcaaaagccttaaaagaagctaatttgataggcttgaagtctcttatagccttgtacagtcctatcattccctcttgacatatatcctctttatctgcacctattaaaaaatatgattttgcttttacttttacaaaattagaatacttgttaattaagtattcttgtgatttctcatccccgagttttgccatcattactatttcttcatctagtttgtcatcaaaattaatttgccgattgctagcaatctcattttccactgatatcccccctatgtaacccacaaaacaattatacaatagtaatatttttcaagtcaatattttcaaagattttttcttattttatccagtttttccattatatttttatcaattctatcttctaaccgattatacttcttttcatttctaattttctcagcttttttgcttattctcccatgaattttttgtacatcattataaaattctatggaagacattctagtagatcctctttgaaaaacaacctgctgttctaaattatcggatgtaactacacaaacttcagattttcttccaactttatttacatatctttcaataaaactatctgctgtttctcctgcctttgtatacactatagtaaatttatcgtacattttaatcttttctccagtgttcccagggatatgatgcgcatcaaaaacaactataatcttgcaattcgtaaattcgccgtattctactaatacctctataagcttatctcttgcactctctaaactcacatcatccttaatagaattgagttttccccaactatttataacattgtacccatccacaagaatagttttcaattttcctatcctctttttacaattctttgctttaaaatttcatacataacaatacctgcagcaacagatgcgttaagagagttgactttacctaccattgggatttttacaagcacatcacatttttgctttgtgagctttgaaattccccttccttcacttcctattacgagagctaaggccccagtcatattttgattgtagcagtaattttctccatcaatttctgctccataaacccaaattccctcttttttaagcttatctattgcaagatttatgttacttactttggctatttttacgtatttaactgcacccgcagaagttttgtatactgttggggtcacacctacatttcttcttttaggtattataattccatgtactccacataattcagcagtccttataatagagcccaaattatgaggatcttctatttcatctaacacaagtataaaaggatcttcattcttttcctttgcatttaaaatgatatcatctacatcacagtaattataaggcgttgatatggctattacaccttgatgtactcctccattagatatcttatctagcttttttctatcaacatatttaacaggtattcctttttctttagcttttgcaagtattacatttatggaaccttcactttttccactagaaactaatacttgctctatagttgaatcagattttaatgcctctatcacagcatttctaccttctattaaatcttctctttctttattatccatatttcctccaaaatacatattttaagcaaatttatttttcataatcatttgttttccacaagtaaattttccttctttgcactttccaaatacacatgaaggaagcgccttaacatataatacttgagatagctttcttagtttttcaagcttcttagttgaaagttcccttatttcccattgagcattaaaacatattctatcagccaacatctgacaatctattctcgcatttgttgatataacaagctttattcgatcacagttaagaagaaaatttagcgatttctcttcaccatattctttaagcacatattttctaaactttttaaattcatgtgttaattcaacaaatctattataaaattcagattccttaacggtacttggaactactacttctcttttttcatcttgtattatattaaataaagcttccctatgattttcagataacctatgccttatctgttgatgataagttaccatactgcacatcattccaaaggtagttcttgcttgctctgctatactctcatgaccatatcctaatactctttcagatacaccctttgccttttctgtagcattgtctccccaaagctccataacctctgacggagttttatcgtgagtactggttatagcaccaagtccaaccttaagatccaagtcttcaaaagaattaagtagaactatattatcacattcacttattttatcaaacgctgatttataaaagttttcaataagtttacgattataattactttttagctttgataaaaacaaggaaagcttttccggcaacttacttaaaacaagcttttttaaatcgctaaaaatttcactgtaatgtctatcattaagcaagtaaaagaaatctataagcttttccccgttcattgccatgcttatattcgtcttacaggctaaaggaagtatatatctagcatcctcaataggtataccatataaatagttttcggctttaggtctccctttaaattgtccctctttaagacgtgacatctcctcataaagttcaaaagcttttctaagtagctcttttgcttttaattcgtcttcatgccttaagtctggaagatcaaaagaattttctttaagtgttacatacctttgactttgctgaacatatgatgccttaagttcacatatcaaagtactttgaagcctattaattccttctaaaacaaaagaaacatttgcacactttaaaatttctcttaactcactaacttctatattttcagtattttctatacttaatattccttcaatttcacataatcctgtttgctcaaaattagttatcttcaatttatcttcaccctttgctattttcctttatttctacgaccttttctaatataaaatttagcctatcaatttgatttgttagataaagatatcctattaaagcctcaaaaccagttgacgctctatactcgcatatatcagcatttttaggcgaagtagctgattttgcatttcttcctctcttatatatccttacctcttcttcatttaactcgtcataaatttccttcataaaggtactttgtgcatgagcttttacaaattcaattgcctttatgtgaagcctatgtactgtcatttcatcgtatttatctactatgtatatcctcacaaaattttcgtaaacagcatctcctacaaaagctaatactaagggattcagctgtactgctcttgtctttgtaaatttatcatttaatatattaaaatccattaaagcatctcctaattttatcagttttaaataataaaaactattcatttatctatgataaagatattataaaaaagattatatcatataaaaaatgattctcgaagttttttggttataatatacgtaaaaagaagtcaggctgtcttcccaacttctaaaaaaactttttatgcttataatacttcattaacctgtgaaataaattctcctactttacgaatcatctcttcctttggtatatcctcctcaacaattttcataacagcacttcctataataactccatcacaatattctttcatcttttgtgccatttctggactagatatgccgaagcctatgcatttaggtacattcgaagcttttgaaactacatctatataagctttaacatcattagctataatatttctaactccagtaactccattagtagaaacacaatatataaagcccttggccccattaactattttacctattctatcctctgaagtaggtgctacaagtggtattatataaaattcatatctgtctgctatttctttcaccctttctctttcttcaagaggtaaatctggtattactattccatctacgccagattctttggaatctttaataaacttctctaatccatatttaaaaacacatccaaagtatcccatatagactattggtattttaacatttttacgtacctcttttaccatattcattatatcctttatcttaagtccattattaagagctccagatgaagatatttgtataataggaccatctgcaacgggatctgagtaaggtattccaagctctattaaatcagctccggatttctccatttcaataactattttctttgtcgtttcaacatcaggatatccacttgtaacaaatggaatcatagcttttttgtttttatattttaactccttaaatttcaaatcaattttatttgccatttttattttcctccatatttttcattacagtatttacatccttatctcctcttccagaaagatttataataacaatctcatcttttgataggctaggtgccagtttcatagcataggctactgcatgagaactctcaagcgcaggtattattccttccttttccgataaatacaaaaacgcctttaaggcttctttatcagttacagcctcatagcttgctctttctttttcctttaagtaagaatgctgtggtcccactcctggataatcaagccccgcagatactgaatatgctggagttatttgaccatcttcgtcttgaagcacataagtcatcattccatgtattatacctacacttccttttgtaagcgttgccgcatgcattggagtatcaatcccgagcccagctgcttcaacacctataagcttcactccttcatccttaataaaaggataaaatatacccatggagttacttccccctcctacacatgcaacaacatagtctggaagtcttccttctgcttttaatatctgctttctagcctcttctcctataatcttttgaaagtcttttactatagttggatacggatgcggacccattactgaacctattacatagtaagtattgtctatattcgtaacccaatctctcatagctgcgtttattgcatcctttaaagtattagtgcccgattttactgaattcacttttgctcctaatatcttcattctaaacacattaagcgcttgcctttcaacatcttctgctcccataaacacttcacattctaatccaaacaaagctgctgctgtagccgtagcaactccatgctgtcctgctcctgtttctgctatgactctcttttttcccattctctttgccaaaagtacttgtcctaaagcattatttaacttatgggaacctgtatgatttaaatcctctctttttagatatatttttgctccaccaagattctttgtcatgttttcagcaaaatatagtggtgtttctcttccaacatatttttcaagataatacttgtattccatcataaatttttcatcatttattgccttattaaattcaacctcaagttcatttattgcattcattaatgtctctggaacatactgtcctccaaattttccaaatcttccattcatttaaacttcctcactctcattataaatttttttatcttctcttcatccttaaagccatctgtctctactccactggaaacatctacagcaaaagggttaagtacctctatacatttttcaacattgtctatatttaagccacccgctgcaataattggctttagtattttatcttggttttccttaagtaaattccaattaaaactcttcccagtacctcctctattagtgccatcatatccatctactaaaaaagcatctattctgtaatttttaaatttttctacatctttaccagctgttacattaactgctttccatactttaaatccctttaatttatctatatattcttcattttcatccccatgaagctgcactatatcaagttttactctaaaagaaacttcctttaccttttctatgtcctcatttacaaacacaccaacttttttaatagatacatctagtttgtctgcaagtttttctgctttgtacatatcgacctgacgcttacttttagcaaatacaaaacctacatagttaggcttatacttatttactatttctatatcttcttctcttcttattccacataccttaattttaaccattatccttagccttctttaaaaattcatttataccctttaaatcatctatatttctcataaaggtttcacctattaaaacagcattcactcctattgatctcaaatacaatatatcttctggtgtttttattgagctttctgaaacaattattctatcccttggtacgtatttcataagcctctttgtagttgtaatatctgtagaaaaatcccttaaatctctgttgtttattcctattatgctgcaaccaatttcagacgctaattttgcttcttcctcattatgaacctcagttatagaatcaagtccaagttccagtgttctattgtaaaagcattccagcttatctttaagtactgctgctattaacaaaacagcgtctgctcctataagcttggcttcataaagttgatattcatctactataaaatcctttctaagtatgggtttagagttcacttcttttacaatcttaatgtattcattttttcccaggaaatatttcttttccgtaagaatcgacactgcatctatgtttatattttcataaatttgtcctatttttacgggattaaaatcttcccttataactcccttagatggtgatgcctttttaatttctgctattatagatatattttctttttcgagagcttctttaaaatttctcttatctaaatttaaagaattcaattttgattttatatcatctaagctaagcgcctttttatcctctataagctggagctttttatcacgaacaatatcatcaagtatcaactaaaatccctcctatacaagttcttcatatttttgaaacgccttaccgctgtctataatattgcaagctagccttactccgtcctttaagttttctgtgattttcccaatatatagggctgctgctgcatttaaaactgcaatatctcttttaggtccaccttttccctttaaaatatctattattatctctgcgttttccttaggagttccgccccttacatcctcaattttagaacgcttgattccaaaatcctcaggttttattacataatcttttattcttccgtcttttatttcacttacaaaggttgagcctgttatagttatttcatctaagccatcacatccatttaaaaccattgctttttctaatccacacttaaggagaacttctgctaatggatgagttaatttttgatcaaatactccaagcacctgcccacctatattgcatggatttgtaagtggtcctaaaagattaaatatggttttgaaaccaaggctttttctcacaggggcaacatttttcatagccttgtgataactttgtgcaaatataaaagccatacccttttcttcaatttctcttttaacctcttctggctttagatttatacttaccccaagctctgttaatacatctgcacttccacttttactagaacctgccctattaccatgcttagctatcttaactcctcccgctgctgcaattatgcttgagcaagtggacacattaaaggtttttccaccatctcctcctgttccacaggtatctatagcgtataaattgttcacctctactttaacagcatgctccttcatggccctcgcacagcctaatatttcttctacctcttcacccttcattctaagaccagttaaaaaagctgccatatctatttcacttacttttccgtccataatttcattcatcgcgccataagcttcattctcacttaaagtttcaaatcgaacaatttttttaatagcatcctttaacattacaaataccccctaaaaagtttttaataagctttcttccatcttccgtaaagtatgactcaggatgaaattgaattccgaatattttgtatcttttatgccttactgccattattactccatcatcagtttctgctgttatataaagttcattaggaaaactatatttatcagcaacaagagaatgatacctcatgacttttaaaggattttttataccttcaaaaatttccttttcgtcatgctttattacagatgtcttaccatgcataatagtctgtgccccaattactttgcctccaaaggcttcggctatagattgatgtcctaagcaaattcctagaataggtataaattcacctaatcttttaacgacttctatagaaattccagcatcataaggagtgccaggtcccggagaaattattattccttctggcttcattttctttatatcctctagcgaaatttcatcatttcttgcaacttttacatccttgtatatctcacccacatattgatataggttataagtaaaggaatcataattatctattattaaaatcacttatatcacttccttaagaatttgggatttattcatactctcttcgtactcattttcagggatggaatcatacacaactccaccgcctgcctgtgcatatgctttaccttcttttatgacaagagttcttatagcaatacatgtatccatgtttccgtcataagaaaaatacccgactgcacctgcataacagcctctctttgtgttctctaattcgtctattatctccatagctcttattttaggcgctcctgacactgtaccagctggaagacatgattttaaagcttcaaagcaatcgtattcttttttaagccttccagaaaccttagacactatgtgcataacatgtgaatacaattccacttccataaacttatccacagtaactgtgccaaactcacttattttccctatatcgtttctagccaggtctaaaagcattgaatgttccgctatttccttctcatcatttataagctcgctcttaagcttaatatcctcttgttcattttttcctctaggtcttgttcccgctattggatttgttattaccctatccttaaacacacataccaaactctcgggcgatgaacctgtaacctgaaaatcattaaagtctatatagaaaagatatggggatggatttttgcctctaagccttctgtacacattaaacggtctttcatctatatccattacaaacctttgagaaggaaccatttgaaaaatatcacccttaactatatattcctgagctttttttaccattttgcaaaattcatcctttgtaaaattagaacttatattagctggattatgactttccggaagcttgtgcatttctctagttttttttgaaatttcactcaattcaaaaagttcttgtttgatttctttgtaggatttatcatcttctctaaacacattatagatgtatacaatactgtttttcacatggtcatagcagataatttttttataaaacatgagaatagcatctggtatttttaaatcatcttcatttaagctgggtattttttcgtattgctttattatgtcgtagcctacataccctactcctccaccacaaaaaggatatttactcttttcaatctttccttcctcagtaagctttcttgcaaccttaaggaatttatcttctactttttttacatagccattcctaataatttcagtattgttactaaatccttttattattgcataaggattagctcctatgaaagaatatcttcctttagattccgaaaataagttactctcaagcaagaacttgtttttcccttctagattataaaataatgatattggagttatctcatctccattttcctcgtaaataacttgaaatgctttttttaactttttgttatcattaaactgttcttctgaaatattgtacataacacactctccttttttcaaaacattaaaaatttttagattattatgtcttttatctgtgcaactatgcttttaaaagttctacgatattagtttcaaattttaataaaaaacgcaaaaagaccacttcgttcctttgtatgggacgaagtggtccgtggtgccacccattttaatctaagtaaataaatagatcatcttttacagatacggaaattacaatttcgatatcctgtccttttaacggtagactttccgaatgctactactgaatacctctttcacagcatcgtctcatagatccattcactacaagctacggtaccggctcacactaacccgactcgctttaaccaatttcttaatagctactacttctattcacagacttgtatcaactaaattgtaatgtaattatataatattcagaatatagtgtcaacataaaatttagatatttattcctttagtggattaaaactttaattcttgtcaccgtttaaggcataaaaattcttctatcctctacttattaagatcacactccattaaagaaactatccttgttttatgcacttttttatatataaaataaaaacataaaaataaaggaatgcttccatagttagttgtaaaatcgaaccaactgaaggtttttgcttgaaacacccatatattagcaccaaataaaactactgtacaaagtatcattgcaaatataggaccaaatggatacaataaagccttatactttaaatcttcaattttatttccttgagcaatataagcttttctaaatctataatgacaaattgctattccaagccatgttataaatgttgttatacccgataaattgtaaagaattgaatatatcttaccgtcaccaataagcgatgcaaaaaacgctgttgatgcaataacagaagtaaaaataagagcatttagtggtacaccacttttatttaatttaccaaatatctttggtgcttttccttctttagccatagcatacatcatacgtgaacctgcataaagacctgaattaccacaggaaagcacagaagttagtataactgcattcattattgacgctgcaagagcaattccagatcttttaaacactatagtaaatggactatacgctatatctgatacaccatttttaagcaaattagaatcattaaaaggaatgataaaaccaataactataattgcaccaatataaaaaataagtattctccaaaaaactgaatttattgcttttggtacatccttttccggattttcagcttcaccagcagctaaacctactacctctgtgccagcaaaagaaaatccggcagttaaaaagctcattaatatagccattcctccacctacaaatggtgctgaattcccttttccatccttaagcacccaattgctaaaacctactccatgtccgcccattattccaaatataataagcactcccataataagaaatactataattgttacgacttttatacttgaaaaccagtattctccttcaccatatgcttttgcagatagcaaattcagaccaaataaaataactaaaaatcctatactccaaatagttgtccctgtatttggcaaccaaaacttaacaacaagtccgcctgcaactaattctgctgcaacagttatcgcccagttaaaccagtagttccaacctaatgcaaaacctaatgctggatctacaaactttgaggcataggtttcaaatgaaccagcgtttggtatcattgtagccatttctcccagcgatgtcattaaaaaatacacaagcacccccataatagcataggctgcaatagcacctcctggacccgccgtacttattgtattaccactagtaaaaaacaaacctgtaccaattgatcctccaatggcaatcatattcatatgtcgtgtttttaaacttctctttaattcaccatttttatctttctctaactctgcagacactaaaactgccccctcttttgttctaatatactaaaagttaattctttaaatttcttacactaaaatataatttcactatgataaagtgctaaagcactaagacaataaagtcttaaagtattatatcatatgtggacatatttataaatataattttttaaaaaaccttatatgaaagcatcctataaattagtatatgattatacccctctatactttataatgtattttttgtataatatatacacaggatttaatattttattacttagcttagataaagaataggaggaaaaatgaagagaaaacttatactaatagctgttgttataatgtttatgtttacaggctgttctctaggagagaaaaaagttaatatttctaattctgaaaaactaaaattaaagcctaatgaagtgatagaaaattatttcaagtactatggtgaaaagagtaggacaggcatactttctactttaacaccttggcaaaacaaacccaacacgaactttgaatttgacaatttaaaatctattaaccttattaatatagttgaagattcaaacttaaagcaaaaggaagcctacatgaaatacggccgtggaagtgttaatggggtaaaagaggaaaatgtaagaatttacaaagttacatttgatgttaaatgcaagaaagatgatgctagtgcatttaccaccggaagaaacgttgaatggtttacagttgtaagaaaaaataaaaattcaccttggttaattgataatcatggcgaagtataaaggttggtattttatattataaaataccaaccttttaaaattatcaaataaaaactactgcgatcaaaaatatctaaaataatataaatgctatataatttcatagaaacgtatttacttacatagattttcacaagagcctgtttttttattacagacaatattattagaaccacaagacggacacatatgcttatcattctcacaatttatttcatatgtatttctgcaatccaagcacttaaatttacaaaatttcgatttaaagtttccgcctcctatagcaattgcatttccttctgttaatgcaattgctatcttttttcttgcactatctataatattttgaaacgtctgccttgaaacttccattttagcagcacattcttcttgatttaattctttaatatcttttaatctaatagcctcaagctcttctatctttaaagctatttcttcgacttcacatttaggttttcccaatggaataaagcatgtgctcttaggaaaaaaatccactttcctaaactttgttggccttgacattttatttcctccccgcatttttatttgcaatttcatataacttctcattaaactcaattattttctaagctataaaaaggacttcagtttattctatattaaacaaaaactccaaatgctagcttatatccaacatttagagttcctaaactattgatgactatgttcaccatgatgattacatactacattcttatcctctaaattaccattaatatattctttaataacctctgtatatattcccgatgctcctcttataaccttaaagcccttctgccttaaagctgtgagggcacctgcccctataccccctactataaccacatctactccatttttcacgagtaaatcagctaaaccttgatgttgatgtaaaagctctacagaggatatcttttctgcatttactatcttatcatcttctaaggttgttataataaaacttttactctttccaaaatgctgatttatcatattttcattattaggtatcgctattttcacagcactcaccctttctatgtttaatctgtataaaaaccaaataaaatttttggcatatgccatttacattatacaatatataattttttcttacaaacattcacatttattaatttgcttccatttatcccttaaaataaaaaatagagctgctacctaatagcaacccataaattcttctcttttaataaggattaatttaacaaatagtttatatctttatcatattcagtatgtccatgtttattaactgttacagaagtatgaaatcttgtttttaaagtaataattaaatctttcacttctttatttttattattctcattaacagaaacggattgccaaagatctaggttattcttattcacaattaaatcaacttttagtactggtccagcacctttttcatcatctacacttatagctatactcgatacatcattgtagtcatatctaatgatagaacctagggtttcaggcgaactaacatatattttatcttttgtaatagtccaaaaattactatatattactgcaccacttatgcccattacaataagcatttttattatataagaataaaaattcggtccttgcgctctactcaataaatgtataataagtaatactaaacatacgcaaaaaataattgaaaaaatcattgataaaagagagtaatatcctgagtacataagtacattaggtatatttaactttctaaaacgtaaatttgaaataattttggctggtatgactaatacattcataaagatagttctaaattttataaaacctattatacaaatgacaaggataaaaataagtgaagtgaatgtagaaattttttttgtcatattaaaagctcctcattagttaattttacataataatattaattataaaatactttactcttttattcaatttgatatttaatttaatttaaatttttattcaatttgtgcctttatttatgctttaagtttaaaatttctataaaaaaatggttatacaacttaatatcattgcataaccatttttatttttaatcaagtacaaccatattttcaatatcagccccagggggaactataggcgttgccatttcatcctctccaacggtaaagtcaattactactggtccatcataatctattgcctttttaagagctgactctactcctgcatttgtatcaactcttaaaccaagggcaccgtatccttcagctatttttacaaagtcagtgtctctctcaagagtagtacttgaatatcttttcttgtaaaataaattctgccactgtcttaccatgccaagaacattattgtttaatacaattatttttactggcaacttatatctaacaactgttgcaagctcatttatgttcattctaaagcttccatcaccagcaatatcaaatgtcattttatctttcccaacgctagcccctattgccgctccaaatccgtatcccattgtgccaagtccacctgaagttataaaacttctaggctttgtataaatatatccttgagttgcccatatctggttttgtcccacttctgttgttattattgcttctccatctgtaagttcatataacttttttattacatatacaggatttacagagtcacatttatttatcctaagtaccttagatttatcttttttcagaagacctagagcatattctgtccactcattaccttctcttgcagtaagcttctcatttactttttttagaacctcttctacatccccaataataaaactatctgctttaatatttttagaaacctctgcttcatcaatatcaatatgaagtatttttgcatttttagcaaaggtatctgcattacttgtaactctatcactaaatctacatccaatagctataactaaatcactttcgcatatagatttatttgatgcctttgttccatgcattccaaccataccagtaaacatatcgtccttgccactaaatgccccaagtcccatcatagttgaacaaacaggacatttaagcttttcttgaagaattttaagctcttttgatgcttccgatatattgcaaccgccaccaacaattataacaggcctcttactttctaatagaagttcaatagccccttctacctccgcatcccttacagagcttttttcaattttttctggcttcctaggttcgtactcacattcatttcccgttacgtctttaggaatatctattaatacaggacctggtctaccactttgtgctatataaaatgctttccttatagtatcagctaaatcttcaacttttcttactataaaattatgcttagttattggcatagttatatctgttatatcaacttcttgaaaagaatctttacctattaatgatgtagctacttgccccgttatagctaccataggtactgaatccatatacgctgttgcaattccagttacaagatttgtagcccctggtccagaggtcgcaaggcaaaccccaacttttcctgtagcccttgcatatccatctgctgcatgtgatgccccctgctcatgagatgttagtacacatcttatttctgaaaatgaatataaagcatcaaaaatatttaagactgctcctcccggatatccaaaaatagtatctacaccttgttctttcaaacattcaagtataattctggaaccgttatatttcactctcatcactcctttgtactatgaaaaactgctcctgtacaagcagatgataccccctgcctatacgtatttaaatatcccttcacaggtttttcaaccttttccggttttctgttttttaatttttcttccggaacaagtaggtttatagttttcttttcaatatctatttcaattgtgtctccctcttcaaccaaccctattggaccaccttctgccgcttctggagatacatgtccaatggatgctcctcttgtagcacctgagaatcttccatcagttataagcgccacactcttatcaagtcccattcctgcaagtgaagctgttggcgaaagcatttccttcattcctggtccacccttagggccctcataccttatcacaacaacatcacctggatttatttttccaccaagtattgccttagaaacttcctcttcactattaaataccctagccggaccagtatgctgcatcatttcgggtgctactgctgcctttttaactatagcgccatctggagctaaatttcctctcaatactgaaagtccacctgtctcactataaggattatctattcttattacatcaatgtttttgattttcgcatccttcacattctcatacaaagttttacctgtaactgtcatacactctccatttagaagtcctttttttataattccattaacaacagccggtattccacctgccatatgcaagtcctctatgtgatgaaatcctgcaggacttaacttacacacatgcggaatcttttcacttatctcatttattttatcgaaattaatatccacgtcacattcataagctatagctggtaaatgaagaagtgaattagtagaaccccctagtgccatatccattgcgactgcattcataaatgcagcttctgtaagtatgtcacttggtcttatgtccttttgaaccaattcaactattttcatacctgcctttttagcaagtcttaatctttctgaaaatacagctggtatagttccattgtaaggaagcgcaagacctaaaacctcagaaagacagttcattgaatttgctgtaaacattccagaacaagacccacaagtagggcatgccgtattctcaagctcagctaattcttctaaagacatttttcccgctgaaactgctccaactgcttcgaatacagagtttagatctgtgacccttccatttgttctaccagaaagcattggtcctccacttattactattgaaggtatgttaactcttccagccgccataagcattcctggaactaccttatcgcaatttggcacaagtacaagcccatcaagagcatgtgctttagccacgatctcaacactatctgctataatctgtcttgatggaagagaataactcattcccttatgattcatagaaataccatcacaaactccaatggttccaaattctacaggaacacctcctgccattcttattccatcttttacagccttaactattttatcaagattcatatgacctggtataagttcgctgtaagaattagctattcctataagaggtctatccatttcctcatctataaaacctaaagccttaaaaagagatctgtggggagctctttctactcctttcattgccttatcagaattcacataaatcactccttttcattttggtggatttgactgtttatacttattaaagttcagctaaaacaagcttacccatttcttttgttccaacttttttacttccttctgtgtatatatcaccagttctgtatccactatttaaaactttttctactgcatcttctacatctcttgcagcttcagtcatattaaatgaatattcaagcatcattgcaactgataatatttgtgctaatggatttgctaaatcttgtcctgcaatatctggtgcagaaccgtgtattggctcatacattccaaaagtatcatttctaagacttgccgatggcagcattcctattgagcctgttaccattgaagcctcatctgtaagaatatctccgaatatgttgctggttactattacatcaaattgtgatggttcacgtacaagctgcattgctgcattatcaacgtaaagatagtttaattcaacctctggatattcctttgcaacctctgttactgtttctctccaaagccttgaagattccaatatatttgctttatctacagaagtaaccttcttatttctcttaagagcagctttaaaagcaacatgtgcaattctctttatctcttctacattatatctttcagtatcataagctgagtttattccgttttgaatatctcttcctctttctccaaagtaaattcctcctgtaagctctcttacaacaagtaaatctactcccttgtttatgatttcttcctttaaaggagatgcagattttaaaatatcataaacctttgctggtcttaagttagcataaagtccaagtccacctcttaaacccataagagccttttcaggtcttttttctcccggaagagtatcccacttaggtcctcctaccgctcccaaaagtactgcatccgagtttttacagatttctaaagtttcgtttggaagaggtactccaaattcatctatagcacatcctcctgccttaacctctgtaaaattaaacttagtatcgtatttcgctcctactttttcaagaaccttaagagcttctcctactatttcaacaccgattccatcaccaggtataacggccaccttatattctttcattaataaccctccaaataaaaatgtatttaattaaaataaacctttctttacacagttagtaagtccctcatttttcatgattttaagcatgaaatccgggaaaggttgagccttgtactctttattcaaagttacattcttgattattccttctataaaatcaacctcaagcttatctcctgtgctagcatcattaacagcttcctcacattctagtattggaaaacctatatttatggaatttctgtagaatattctagcaaagctttttgctataacacaagaaactcctgccgccttaatacatattggggcatgttctcttgaagatccacatccaaaatttcttcctcctactacaatgtcacctgtttttaacttttttagaaaatccacatctaaatcttccatacagtgttttgcaagctcttcaggtaccgaagtatttaaatatcttgctgggattataacatccgtatcaatattatctccatattttaaaacatctccattaactttcataattataaaacctcctctggtgatactatttttcctgctattgctgaagctgctgctaccgctggacttgctaagtaaacttcactcttaggatgtcccattctacccacaaagtttctattagttgtagatatagctctttctccttctgcaagtattcccatatgacctccaaggcaaggtccacaagttggggtacttactattccgccagcttctataaatgttctaactagtccttcttccatagcttcaaggtatatgttttgagttcctgggaatactataagtcttattcccttcttaattttctttccttttaagatcgaagctgcaattcttaagtcttccattcttccattagtacatgaaccaattactacttgatctacattaacctctccaacctgatctatagtttttgtattttcaggtaaatgtggaaatgcaactgtaggctttaatgtacttaaatctatttctataaccctgctgtattcagcatcttcgtctgcatcaaatttctttaattctctatcacttctacccttcatgtattcaatagtcttttcatctacaggaaatattccattcttagctcctgcttctattgccatatttgcaattgtaaatctgtcatccattgaaagatactctagaccatcacctgtatactccatcgatttatataaagctccgtcaacaccaatcattccgattatgtggagtattatatctttaccagacacccattttgctggcttccctttaagaacaaattttatagcctctggaaccttaaaccaagctttacctgtagccattccaactgccatatcagtacttccgacgcctgttgaaaaaactccgagtgctccgtaggtacaggtatgtgaatctgctcctattattacatctccaggaacagcaagtcctttctcagggataagtgcatgctcaattcccatttcacctatttcaaaatagttctctatttctttacttttagcaaattgtcttatcatcttacagtgttccgctgattttatatccttgttaggtgtgaaatgatctggtactatagctactttcttcttatcaaacaccttgttagttcccatagttttaaatgctttaacagctactggtgtagttacatcatttcctaaaacaagatcaaggttagctgttataagttgtcctgcctctacataatcaagccctgcatggttcgcaagtattttttgtgtcatagtcatcggttttttcattgttattttcctccttattgcattgtattaatttatattctactgaatctacaagtgctagccagctggcttctattatgtcataggaaacaccaactgttgtccatgttgatacaccatctgtagactcaattaatactcttatttttgcacttgtagccttagttccactgattactcttaccttatagtctgtaagataaacatttgctaattctttgtagaacactccaagtgcttttcttaaagctttatcaagtgcgtttacaggtcctttaccatctgctgcggttgtttcaagtttgccattaaccattattttaactattgctgtagcacttaagtcacttagatatggcctttcagcaattaccttatactctacaagttcaaaagatggtctaaatacgttaagttcttttctcataagaagctcaaaacttccttctgctccttcaaattgatatccaagatactctaagtcctttattcttttaactactgcctttgtttcgggagaatccttgtctattttaggatttatcctttttaaagctggaagtattgtactccttccagatacctcagatacaagtattcttcttgagtttccaaccctagatggatctatgtgttcaaaggactttggattctttcttacagcatctatatgcataccacctttatgagagaaagcacaatttccaacataagcaaccctctcattaggtgtcatattacaggcttcacatatatatctaaaagccactgtcaaatattcaagcttatcattttttatggtattatagcccattttaaggcttagatttgctattatgtttgataaattagcatttccacatctttctcctacacctgtaaaggttccttgaacatgattaactccataatgcactgctacaactgaattggctactgccatgccgctgtcatcatgaaaatgtactcccaaattatcaaagtttaaatcccttactaagtacttgactatgtcactcacttcatttggcatagttcctccattggtgtcacaaagcacaatccattttgctcctgctaatctcgcagtatttaaaacttctatggcatattctttattgcttttaaaaccatcaaagaagtgttctgcgtcaaatacaacttccttattcaaagaaactaagtattttatgctatctctaatcatgtttaaattttcttcaatagaggtttttattatatctgtaacatgaaagtcccatgccttaccaaatatagagaatacatttactccactatctacgagtttttttattccttcatcttcctcagcctttgcacctgctcttctagtacttccaaatgcacacaacttagaatgtttaagctttaaacttcttatttcttcaaagaattctctatcttttgggtttgagctaggatttccagcttctatatagtcaattcccagttcatctaacttttttactattttaatcttatcagccacactaaaggaaacaccttgtgcttgagaaccgtctctaagtatactatcaaaaatgtacaccttcttttccttgcccatattgtaacctcctaacttgttgaattagatttaaaattatgactattaagattattgaaatttttagattattctttaatttcagattatcttttagttcaataatttttggtataaaaaaacgacccacattctctccttggggcgagaactctggccgcgcggtaccacccaaacttttaacttaaagcaataacaaggcactactaacttttaaatttaaacgtacttctttaaattcacatttaattaaatagtgactaaagcttttatttgattatttaaaaactcgatatacaaattcaactcatcatcaattggactatgaaatgataataatacctaattcaaaaaatgtcaacactatttttattttattgttattattttttatatagtaatctttttttaataatgtcaatcttgaaaacaatattatttaacgatttagtaatttcatttcttctaaatattatattattaataatataatatttagataaataagtttaatactggaaatttgttaaacatgaaaaaatacaaaaaaggattattgacacatatttttttttatagtatagtaatcataagttcaaaaactatgacggagaaaagtaaacaaaaatatgctttcagagagtgggagttggtgcgaacccataagctaaagttgttgaaaatcactccagagttgcaagctgaaatttatatgtaacaatataaagactaggtgacgccggtagacgccgttataattataagagtaataatttgggtggtacagcgacagatattcgccccatggcggtctgtggttgtttttttgtactcattttgcttttattattgtttagaaactctcatcatacatcaatcaattagactattaaaaatttgcaattgcaaaaatttttagaaaaataaaggaaatcatctatatttctgatttccaatatattattaacttagtatagaattttggcctcgctctatagctatgcttccgctgcttacaacttcaataattccataaggttctagcattttttgaaatgcttctattttactgctatttccagttatctctatagtgaaagttttagttgtaacatcaacaactgatgctctaaaaatggataccgtatttagtatttcttgtctttgcactccctcagcattcactttaataagcattatttcacgacatactgaattttctctatttagaagcactaccttatgaaccacctcaatcttttttatctgctttacaatttggtctatttcattttcatctttaacacttgctattaaagtcaatcttgatatcttatcattctctgtaactcctgctgttacactttcaagattatatcctcttctattaaagagcccacaaaccctagtaagtaccccaggaatattatcaactagtactgataaaacatataaacgcaaaataacacctctcccttatctttgaattataattttctttaaaatttaccactttgcaaactaaaagtcaacaaacaagttaaaaaaataataatatgataattaaagctattatacttttaacattttaaaaatgatgcatgtacaaaagtttaatttaacaaaatagcagattagaacatttcataaaacattctaacctgctatttttattattcattatttatcaataaacttccaccttattccttcaggtgtatcctctaatactattcctctttctttaaggtcatctcttattttatccgcaagtgcccaatctttatttttccttgcattttgtctttgctctataagattttgtatttcatcttctagattatgtttttcaaccttttgaagtattccaagaggttttccaagttctctcataagacttatagccttctcaacagcagccttgcttgattttccatttatatttatattaatatccttagctaaatcaaatattacagaaataccgtctgctgtattaaaatcatcatccattttttctataaacttttctctatagctatccagtgcttttaaatattcactatcatcattactctcagctgtattatttaaaaggcttcccaaattgtttattgtattataaagtctttcaagagatgtcttagcagcctctattgactcctcagtaaaattaagtggtgttctataatgagctgataataggaataatcttataacctctgcatcatactccttaagaatgtctcttgctgttaagaaattatttaatgacttagacattttctcattatttatatttaagtaagctgcatgcatccaatactttgaaaatggctttccagttctagcctcactttgagctatttcattttcatgatgagggaaaattaaatctatagctcctgcgtgaatatctatagtatcacctagtaaatctcgagccatgcatgagcattctatatgccatcctggtcttcctttcccccatggactctcccaagatggttctccaggtttctcgctcttccataatgcaaaatctgcaggactcttttttctgtcatcaactgctatagttgctccagccattctatcctctaaattctgccctgacaactttccatattccttaaaggcgtttgtattaaaatatacatctccatcaatttcatatgcataaccttcatcttgaagaccttttacaaaatctattattttacctatatattctgttgctcttggattacaagttgccctttccaaattaagaccatctgcatcctcatagtattcctttatatatctgtctccaagctcctttacactaactccttcattattagcctttgctatcattttatcatctatatcagtaaaattttgaataaagttaaccttatatcccctatactcaaaatattttcttacagtatcaaaaacaataaaggttctagcatttcctatatgaaaaaaattataaactgttggaccacaaacgtacatttgtacctcattaggctttaccggaacaaattcttcttttttccgagtcatagtattatatattttcatgttattcctccttgtctacagtatttaactttcaattctatttcaacgctaagttatttttttcaaactcttcttcaactctagctataactttatctaaatctataacttctacttcttcactgtttctgcacttaaattctactttgccttcagatattttctttccaacggttattctcattggaatacctattaaatctgcatctttaaatttaactccggctctttcatttctatcatccaaaagggcatctacccctattttcttaagctcggtatataacttttcagcttctttcatttgctcttcgcttttaaataccgctggaacaactataacctcgtatggtgctacagataaaggccaaactattccgttatcatcatggtgttgttcaacaactgctgacatagttctattaactcctataccatagcagcccattataagtggcttactttctccattttcatctacaaagtatgccttcatagcctctgaatattttgttccaagcttaaatatgtgaccaacctctattcctcttgctattgttaatggtttgccacatttaggacacttttctccctcaacagcatttctgaaatcacccactgtacctttgaaatctctatcataatttgcatttgcatagtggtatcctgtctcattagctcctacaataaaattgtacatatatgttacttcattatcaataagtaaataatccacatctaaacctattggtcctgcaaatccaacctcagctcctgttgcttttttaactgttttttcatctgcaagctcaacatctactgaacctactgcatttttaaccttagtttcattgacttctctgtctcctcttaccattacagcaacaactttattctctgctctatatattatagttttaacaaattttttggaatccacaccaaaaaactccactaactcttctatggttttcgcatgaggtgtttcaacttttttaagttcccctaattcttctttatcagctttttctggaacagctggtgccttctctatattagctgcataattacattctgtacaaaaagctatttcatcttctcctatttcggacttaaccatgaattcagctgaaccagatccacccatagctcctgaatctgcggcaactgcactacaacttacattacatcttttaaatattttagtataggcttcatacatcttattataagatacgtccaatccttcattatccttatcaaagctgtaagcatccttcataacaaactctcttgaacgtatcataccaaatcttggtcttctctcatctctatactttgtttgaatttgatacaaatttacaggtaattgcttatatgactttatttcacttctagcaaagtccgtaaagacctcttcatgtgtaggtccaagacaaaattctctttcatttctatccttaagtttgaacatttctggtccaaatacttcccatctccccgattccttccaaagctctgatggtaaaagagctgatgctagaaattcttgagctccagcagcattcatctcttctcttattatattctcaaccttctttaatgcttttaatcctagtggcatataattatacactccggatgccatttttcttatcattccagatctaagcataagtttatgactttctatttccgcttctgctggactctctcttaaagttaacattagcatgtttgacattttcatttttaattgtcctcctataaattttatttacaaaaaaaataaaaactcccccagtattagggcgagtatgatcgcggtaccacctaaatttgtactcattaattaaaactcaaaagcaggttcaaagctaggttgaaaatctttcagccatggattttctctctgaatttatgaagcttctactattctttatcacagttttactattagtttttcttaatttattattatacgtttttaaatattatgtgtcaatagttttattacctcttattgtgttttgtatcaaattaaacatattattgacttaagtgtaattttataatataattgcactaaacatatatgtttactataattcagttggtataaaataaagaaaccagtttaaaagctttactgtatctggtctcttcaaaataaatttaatagttcatctgtttaccagacaaactggaggcagagtattttttataatatgaaaaatactctgccttttattttataaattataaggggtgttaatattgaaaagaaaatttattactgtagttattccatcaataattatagcttcacttttatcttcctgcacaaatacttctaattcaactgcagcaaaagctacaaaagtatctagtctaaaagatcaatatattaaagctagtttgcctagcaaaaacccggaaaaagcaaaaaatcgcaaagataccttcattgctgcaataagcgaaccaggaggagtttttcttccatacttctacgataatggctgggatggaaatgccacagatcctatttttccttctctagttagcacggatgaaaaagggaatccaattgcagatttagcagaaaagtgggacatatcctctgataatctaacctatacctatcacttaagaaaaagattaaagttcagtgacggctctcccctaacatctgatgatgttgcatttaccttgacacttttagatgatccctcctatagtggcagctttgacatctcaacttgctatataaaaggaagtaccgattataaaaacggtaaagctacttcaatatcaggtattgccgttgtagaccctttaaccataaaaatcacaactgaaaagataaatcccttaaacctaactaggctaggtggtcaagtactatcaaaagcttattacggaaaagactacaaaaaaggaaatcttgattacttaaaatcgctatactcaagacctttaggcgcaggtccatataaacttgataaatacattcccggtcaagaaatacgatatactgcaaatgaaaattattacaaaggaaaacctaaaatagaaaactttatttttaaggttactagtaaggatacaaaccttcaattgtttcagacaggagaaattgattctgattcatttagcacagacaaagacaccgtagatcagcttgaaaacttagggtttgccaatatacgaattagcactgtaagtgactatggttttgtatatatgaataacaaaaaaccttacttaaaagataaaaatgttaggcaggctcttatttatggtcttgatcgtcaaaaaattgttgatgtagcatacaaaggctatggagaggtggctaacgtacctacttcacctcttgtattgtcctacactacagatggaattaattcatataaattcaatcctgaaaaagcaaaaaaattattagaagatgatggttggcggcttaattctaatggaatacgcgaaaaaaatggtcaaaagcttaagatatcatacttaacttcaaaaaatacggatcaaacaatacctatagctaaggaaaactataaagcactaggtatcgacttcgagcctgaaatcatggatttcaacactttagttgagaaattaaataaaggtgactacgacctagctgctgtacgcacaagcggacttgtagatccaaatgactctgttgaagaattttcatctaaaaaaacttctgaaaatgtcagtggatatttcaatccaaaggttgatgaattaatttcagagggtgtaaataccttaaacgttaagaaacgtaaagcaatatataaaaaactctataaagaattatcagacgacccaccagttatattaatagattataggaagggcttaaaggcttggaacagtagaattaagggtatggaaaatgataattttgcaggagtttcatctactaatttatcaaaattaaagatagaaaattaactgtgtacagtttctaattaagcttttagcctatacatgcccttattaatcttttatagcatgtataggttaatatttataggaggatgcttatgaaaaaatatatattacgcagatttcttcaaatgattcctacacttataggagtctccattattattttctatttattttctttaatgcctggagattatatagattcaaaccgaaaccttacaccacaaagggcacacgaacttagagttctaaatggtttcgataaaccaatcatagttagatatcttatatggttaagaaatattttgcacggagattttggattttcattgaaatatttagagccagtaacaactctaataaatcagtatatatggaactcattcatcatagctattgttaccctaattcttacttggtccattgctctagtaatcggaatattctcagctacaaaacaatattccttttttgacagagtaataacactgcttgtatttgcatcattgtcttttccatcattttttataggccttttaatgattaaattctttggagttgatttaaaaattttacccatcggtggtatggtggaaaccggaagcaccaccataggactttctcatattttagaagtaattcgtcatatgattcttccagttggtatacttacattcttaagtattggatcacttacaagatatttcagaagtagtatgttagacgtacttaaacaagattttataagaactgctcgtgcaaatggacttaaagaaagaaaaatcatctttaaacatgctctaaaaaatgctattctacctgcaattacacttctatctttcgagctccccggacttttttcaggtgctattataactgaacaaattttcaattggcctggaataggaagaatacagcttgaagctcttagtttcagagattaccccgtactcatgacttttacaatgctactttcatttctcactattttcggtaatttctgtgcggatattttatatgcagcagcagatccacgaataagattagaatagaaagggtgaatactacgtgtttctttttaagaataagaatatcaaaacttctaataaatccttatcaaaacaaacacttaaaagaattttaaaaaataagttagctataatgagtatcattttccttatatctatactcatatttaattttttaggcccatttttctctccctattcttacaatgatattgatgtaagtttaattaaacagcctcctagtatctctcatttattaggaacagatgactacggtagagatgttcttactagattaatgtacgcaggtagaatatctcttactgttggccttgcttccatgattctttctcttcttttaggaagtatacttggttgtttatcaggatattatggaggtatattagacatcatacttatgagattatccgatatattgatgtccattcctggattacctcttttaattataattgctgcacttctatcggaattaaaagttccatctgattatagactttatatcgttatgctaatgttaagctttgtaggctggccaggccttgctagaatggttagaggtcaagttctttctcttcgtgaacaaaattttatgaaagcagctgatatactaggactaagtgataaaagaaagatttttcatcatttactaccgaatacctttcctttgttaatagtcgttgctactttgagtactgccgacggtatattaagtgaatcttccttaagctttcttggtcttggtgtaattccaccaacaccatcctggggaaatatgataaatgcggccaataacttaatagattttcaaaaacgctcctggctctggataccacctggtctggctatatttctcactgtaatttcaataaatttacttggtgatgcattgagagatgctttggatcctaaaatgaaaggtagataagtaactatgaaagaagatttgttaaaaatcagtaatttaaaaacttatttctatattgataatgatatacgtaaagctgtagataacatcagtttttcagttaaaaaaggtgaaactgtatgtattgttggtgaatcaggctgtggtaaaagcgttacttccctctctataatgggacttataaatgaacctggaagaattataaacggtgaaattttatataaaaataatgatctcttaaaactatccaaaagtgatttgcagaagttacgaggtaaagaaatttcaatgatatttcaggaacctatgacatcattaaatcccgtctttacaataggtcatcagataacagaaatattacttgagcatgaattaattaataaagatgaagcctataaaaaagctatccgtttaatcaattcagttggattaccgagagcagaagaaataatgaaatcatatccacataaattaagtggtggtatgcttcaaagaattattattgctatggctttaagttctaatccaaagcttttgattgcagatgaaccaactacagctttagatgtaacaatacaagcacagattttagatttactaaaaaaattaaaatcaactttaaatacatcaattttatttattacccatgaccttggagttgttgccgaaatagctgattatgtaattgtaatgtatgctggaaagataattgaagaagctccagttatagaactatttaaaaaccctaagcatccatatacacaagggcttttaaattcaaaaccaattattgggaagcatagagataagctttattctataaagggttctgttcctgatttatctaaacttaatgaatcatgttactttcatgatagatgtgaacattgcaaagatatatgcacaaaaaaatcaccagcctttacagtaaataacaatcataaaactgcatgctggctttatgaaaggagatataaatgagtaacaaactacttgaagtaacaaatttaaaaaaatattttcctgttacaggtgcaggtgccttcttaagtaaaaatacaggatacgttagggctgttgacggagtaagttttaatattaatagaggtgaagcttttgggttagttggagaatctggcagtgggaaaacaacacttggtcaggcagttcttagaatgacttcaaaaacttctggaaacgtaaattttagtaatatcgatatatattctcttcctaaaaaggatttaaaaaagctgcgttcaaaagctcaatatatatttcaagatccttatagttcattaaatccacgcatggagataggacgtgctatagctgagcctttactagaacatggtttagctaccaaagatgacgttattgatatggtaaaatattttctctctttatgtggtttagatccaagttatattaatagacttccacatgaattttcaggtgggcaaagacaaaggatagtaattgctcgtgctatggcattaaatccagagttcatagttgcagatgaacccatttccgccctagatgtttctatacaagcacaaataataaatttatttagtgatcttagaaatgagaaaggattgtcttatttatttatatcgcatgatttaagcgttgtggaacatctatgtgataggattgctattatgtatttgggaattattgtagaattagcatctcgtgatgaattatttagctttcctaaacatccatatactaaagctcttctgtcggcagtaccaatacctgatccaacgttaaaaagaaatagaataatacttagtggcagcattccaagccctacaaatccaccttatggatgcagatttcatactcgctgtccacatgcccaaaagatttgtgaagaaattcaaccaatgcttaaggatgtatcaaattcacataaggtagcatgccaccttgtttaaatacctacttaaaaataacaagataccataatcctatttttcaagaattatggtatcctctattgtatactatttttttttaatagtgtttctgcagcatataaatcgtctggtgtagtaatttttaggttttcataactcccatcataaaggtatactttgtttcctgacatttcaaatatcatggtatcatcagttgctaaaataccttctttttcagcatttatatgagccttaagtattgaatcatatttaaaacattgtggagtttgaacacaaaacaatttacttctatcaattgtcttttcagaaaatccatcttcactttttatctttatagtatctttaggctgcacaccacaagctgctccaccatacttttcagcatattttattccattttctataattttattgtctacaaatggtcttgctccatcatgtattaatacaatattcgcagatttaacagctttaaggccattcataactgactgctgcctctcactgccaccagaaactatatttttaaccttattgaatttgtacttataaactatttcttgcatacaaaaatttatttcactctcagctgccacgattattatctcatcgattaacggacttctttgaaacttgtctattgtatatgctaaaataggcttaccttgaataagaatgaactgtttgttcttattcaccttcattctactacctctgccagctgccattataattgcacaattcattagttattaactccttgtctatcttaattcttctgccttgcaaatatcattctacctgctgctgtttgaagaacagacgtaaccgtaacttctctagtttctcctatatgacttcttccaccttctacaactatcattgttccatcatcaagatatcctataccttgaccagactcttttccatccttaataatttgtatagtcatttcttcccctggaaggacaacaggcttaacagcattggcaagttcatttatattaagtacaggaacaccttgaaattctgctaccttattcaaattataatcatttgttattacttttcccttcataacctccgctagctttaaaagtttaacatcaacctctggtatatctgggaaatccttgtcataaattttaacctctatatttaactctttttgaatcttatttaatatatcaagacctcttcttcctctattccttttaagtccatctgaagaatcggcaatatgtcttaattctttaagtacaaaacctggtattacaagagtaccttctataaagtcagtttggcatatatcaaatatccttccatcaattataaccgaagtatccaaaattttaggacttcctttagaaacgcccttagttttcttatcttttgcagctcctgattttctaagattataaaatagattcataatctcttctcttttctttattgccacatctgcaccaaaaacagccattataatgtttacaatgataaatattattgtaaatatatatgcaaatgcacctgatgataatctattaagtgaacttgctaataaagaagcaattataagtcctattatggcaccccctgttccaaataagacctcagaaactggaatcttctgaatagttctttccaaataatccataaattttaatattaaagaattaatccatggggatattatgaaaaatattatacctaatagcaatacacaaaatactatgaaaattattttttcaacatcattatttttgacaaaattaagttgagaaaaataattacctcgtaacataatactggccaatagatatcccaaaaccaatcctataacggtaaaaagtcctctcaatattttatttagcaatttaagccacctcctttattaattattaacagttttataattttaaatctaaaaaatgtaatttttttcttaatgtaatataaaataaattttatatgctttcaacaataaagtatacgttaaaactacaaatatatcaagattgtttacaatattttcaaatatttatccccctattatttaattagatattgttttaatatataaagtgaaataaatcaaaagggtaataaatcgttctagtacatttctatatagcagcataattgtataagtaattttataatgtactaaaaaaacaatttaattacaacctacaaaatactccacaaacttctttataattactttatacatatcaccaatatgttcaaggagatgaataaaatgcaagatttaatttttgatgaatttcaaaatttagtagatgaatcgttaataaggcattcaagtttattagatatactttctaaacttcaagaatcacaaggaagaatcaatagagctgtgacaaaatcagtaactcgctgcggatgtatagaaataaatgcttcaaagcagcaaataccaaatgatttatctgacattaatgctttaaagaagtgtctaaaaactcacgttagcggaaagctatgtgaaggttgcagagatattttaataaacgaaattggaaacaacttattctatttatcagctctctgcaatactcttgatataaatttatatgatgtattacttagagaatacgataaaatagatacattagggaaatacaacttaagataatatatagagttatacatattgtataactcttacactataattgctttcttattatggtttgctcttttaactttctaagtccactttttatcgctctagctcttgcttctcctataccttcaaccttatcaagatcctcatgagacgcctctaaaatctttttaagctccttaaagtttttaacaagattctctattacaataaaaggtatcctaggtattttgcttgtcatcctatatcctcttggagatataagtgtatctataagaggaacatcgccgtatcccattacttttgaaatagcttcactgtttaaaaactcttcagacgacatactttgtattgtttcacaaactttactgtaattcatctcattttgacagtaatcccttattataagcattccatcctgttcaacattttttacaagctcatttaactgcatagatataagccttccttcgttaccaagctcacatatatatctatctatttcagttactactctcattaccatttcagttctttgaatggctgccacaacatcgtgaagagtacataaatcttcaaattcaagtaaatttaaatttcccatcactctatccaaaacagcaacatacttttccaaagtttgaattgcctgatttgcccttgcaagtataatactactatcacgtaaaatatattttatatcatccttataaatagttattacatttcttctttgtgatattgccacaacaacatttcctgtttgttttgccaccctatgtgctgttctatgtctagttccagtctcaaatgtaggtatagaagaatccggtactaattgaacattagcccttacaattttttttaaatcactacttaaaattattgcaccatccatctttgcaagctcatatatgtaagatgcactatattcagaattgattttaaaaccgccatcacttaatttcattacctcttcattatcacctaagactactaatcccccagtttttgctcttaaaatattttcaagtccttctctcatatcagtacctggggccattgttttcaatatttctagaagcttcctatcttttttcaatctcaaatcattcactttaatcacccttaaaaaactttatttacagcttcctttaaataagatacacctattatatttatcgcaatatttttgtcatttttaatatttttttgtggcattaatatatttttaaaacctaatttgtcggcttcattaacaattcgatcagaaaatgatacgggtctaacttctcctgttagtccaatttctcctactactatcatcttatctagctttatacttactcccttaacactagaaactagagcaagtgctaatcccagatctccataagttccttctatatttagcccacctacaacatttacataaacatcacaattatagaatggcaccttaagttttttctctaacaccgctaaaattaaatttaaccttgaactatcgattcccacagaagttcttctaggcattacagcatttgtttttgaaactaacgcttgtatttcaacaagaattggtcttgttccttccataatacctattacaactgatccttcctgattaaaatttgtctcctctaaaaataaacttgaaggattgtgtatttgctcaagtccctcttccttcatttcaaaaacacctatttcacttgttgttccgaaacgattttttaccgttctaagtattctaaattcttctgttctttgtccctcaaaagtaagtactgtatctacaatatgttctaatacccttggtcctgcaagctccccctgctttgttacatgtgctacaataaagaaaggtatattatccgtcttcgctattctcataatatcattagcacactctctaacctgtgatacacttccaggtgcagaagttatctggtctttatacagagtttgtattgaatctattataacaaaagcaggttttatattttcaacatgtctctctatactctccatattggtttcagctaatatatatatattagctgaagtcactcctagtctatctccacgcatttttatttgatgttcagattcttctcctgaaacataaagtacttttccatattttaaagctatatcttgacagatttgcaataagagtgttgattttcctatacctggcgcaccagatataagtgtaattgaacccttaacaagtcctccaccaagtactctgtttaactctgtattatttgtatcatatctttcatactgtcctgattttatattatttatacatttaggttcactatttaatgtgatcttacttgcttttttgttttctactctttcttcttcaacaaagctattccaactattacatgaaggacattttcctagccattttactgactgatacccacattcctgacacacaaaaaaactttttactttgctcatcttaatcactcctattagtacataaataattatacaatacttttcacttatttgtcagtaaaataaacatatacaatagcccaatttacttagttcatataaaattaataagtgacagatgctatcatggtatactatcttataccaaatgactaacaacctgtcacttaaacatttataaactattaagcttttgtaaatagtaactctttatctttatccacatctacggaaatattatcatttttacttattgttccctttaatatctcttctgaaagtttatcttcaacagcttttattatagttcttcttaaaggccttgccccataagtcggatcaaatcccttttctgctagaacttcttccgctttttccgtaaaattaatttttatattttgttcctttaatcttccttttactgattcaagcataagttttactatttgtctaagatctttttcctccagcttatggaacacaactatttcatctattctatttaaaaattcaggtctaaatgaatttttaagttcctccataatgttttctttcattttgtcatattcttgtcttactgcatcttttgccgtttcaaatcctaaagtcttttgttttcttattgtagaagctccaacatttgaagtcattattattattgtattagtgaaacttacagtctttcctttagaatcggtaagtcttccgtcatcaagaatttgcagtaatatattaaatacatctgggtgagctttctctatttcatcaaaaagcactacggaataaggttttcttcttactttctcagtaagttgtccgccttcatcataccctacatatcctggaggagaacccacaagacgagataccgtatgtttttccatgtattctgacatatcaattcttataatattattctcatcaccaaacatagcttcagctaatgcctttgataattcagtttttcccacgcctgttggccctaagaatataaatgaacctattggtcttttaggatccttaagaccaactctagctcttcgtactgctcttgaaacatactcaactgcttcttcttgacctataactcttttatgaagtatactttcaagtttaagtaacctttctgattctttctctgtgagtttttcaactggtatactggtccacttagcaacaactgcagcaacctgcttttgtgttactatataattttcgttatcacttgtatttttccaattctttttaaattcttcaatagcaattctcaacttcttttctttatctctaagtttagctgctttttcaaagtcctgaagtcttatcgcatctgatttttctcgtgtagttttttctagctcttcttcttgattttttaaatctggcggtgctgtaaggttttgaattctaacttttgcagctgcctcatctattaaatctatagccttatccggtaaaaatctatcttgtatatatcttgttgaaagatttactgctgcctctattgcatcatctgtgatttttactccatgatgagcttcatatttgtccctaagtccctcaagtatttgaactgcttcttctttactaggctctcctacatctactggctgaaatcttctttcaagagctgcatctttttctatatatcttctatattcctctgttgtagtcgcaccaatacactgaatttctcctctagcaagtgaaggttttaaaatatttgatgcatcaattgcaccttcagctccacctgcaccaacaatagtatgaatctcatcaataaaaagtattacatttttagccgcctttatctctgtcataactttcttaagtctttcctcgaattctcctctgtattttgaccccgcaactaacgatgatacatccaaagtaataactcttttatctttaagtatttctgggatattaccctcaactatcttttgagctaagccttctgcgatagccgttttaccaactcctggatcacctataagacatggattgtttttggttctcctacaaagtatttctaatattctttgcgtctcattatctcttccaataacaggatccaactttccttctaatgccatttgtgttaaatcagttccgtattgattcaatgttggcgtaactgaagtatttgaactaaaacttgtttttattcccgtgttctcttctctaccagataaactatctaaaatttcttttctaagtctttcaaaatctactccaagattaccaagaatagtaaatgctactccttcactttctcttataagtgctaatagtacatgttctgggtttatatagttatggtttaaatttctagcttcaagtaaacttatttccaaaagccttttagtcctaggtgtaagaggtggttcttctttgtaaagatcagaatccccaaaaccttcatactcctctataagccttcttaccttttctattgtaactcccatattggctaagagagattgagctttcccattttcatctcttaaaatgccaagaagtatatgctctgttccaacatatccatgtttgaaattttgtgcttcctcctgagcataataaatcattttttgagctctgtcggaaaatctaccaaacatcataaatattcacctaccttaaattttctcttacataaagggctcgctttatattttcttctttcttagataattctttattataaatctcctgtagtgttgccctttgcgtattaactaacaaattgtttaatgattttttacttatatcatttataattcctatttctacacccattcttacattcgaaataagatttaagcattcattactgtctagaattacggagtttttaagtattccaagtgatctagctattttatcttctaattcatatttgtactttttcatcagttgttctcttgataaattttcttggttaataatttgttcaacaacagtttttaaatttgatataatgtcattttcactcatacccaaagtaatttgatttgatatttgatacaaactaccaatagccttagaaccttctccccaaagacctcttatagtaattcctatttgggataacgcatttaatattcttggcatctcattattcattgataatgctggaagatgaatcatcacagatgccctcatgccagttcctatatttgttgggcatgcagtcaaatatcctattttctcatcaaatgcataatctaagttttcctcaattttgtcatcaattctatctatacattcgtatgcttcttccaaatttagcccagcagttattgcctgaagtcttaaatggtcttcttcatttaccattacacttatagtctcatccttatttagtataaatgctgatctattataattttctataagttttttacttattaaatgtttttcaagatactctgcattacaattgttgtcatttttccataaatctatacatgtaaaattttcttttccatcattagaaacgataagtgtatctttaattttttttactacatctcttccttcatcatcggataatttatctggaaaaggtattccttttatatttctagctagcctaattcttgttgttattactatatcattgtcttttaaatcgctattaagccaatttttcatatcatttttcacctccatctttttcttgaaggctttttattttatccctaagttctgctgctttttcatactcttcttcaagcacagctttttgaagttctgccttaagttttagtatattatttttatttattatttttcttcctgcttttttaggtattttaccgttgtgttcaacgttgccttgaaccctatttataataggtaataacattgaattaaagtatttgtagcattcgctacatccaaataatcctttatctttaaattcactataagtagttccacaatttttacataccaattcttcacatttagtgctttgagaactacctccaatataatccattattccacttaaaatattttgaaaagagaatggagaaataaagtcaatatcagaagctatattaactccttgaatattttgagcacagttttcacatacatttaattctcttttatctccatttattatttgtgttatatgaacattagcctcatttttatgacaaacctcacatatcataattttcaccaacctttcaatatattatacagacaaaataataagcacagatttcatgatttgggctctcaactcattccttttatcgcccgcatataataatgctctatcatttatacaggcctttattattgccacttccctagatgttaaaagattcatatcaaaaagaccatctattatcttacatccagcatcataagttatactattttttattctatccacaatagaatttataaacggctttttttcattttctctatattcaactttacgaattcttatgcatccgcctccaccacgcctactttctatatagtatcccttatccgtagtaaatctagttgttaaaacataatttatttgagaaggagcacaactaaagtgattagctaattcatttctctgtatttccagctcattttcagtgttttcagcaatcaattcctttaaaaattcttctattatatcagataatcgcattatgttttcccctttatattaactttactttgactttctttgactttattatataacataattttgtatttttcaatactatatcataataattttttatcttccattttaggttaaaagataaaaatagagttctaatctaaatatctaattatctttttataaacatatacaaattaaatacttactattaaaccctatttctatttgtccattttttcttcttctaaaattcaaacaagaactatataaatctatctattcattttaagcgctttaatattgcacttaccatttttatctacgtatctttgctttatttgaaacttattattttcaagcatattacatattatatcaacattttttttatctccattttccattactatagtaaatttatcatccttatttataaattccatgtaatcatgaatattactataatcgcttaaatttattttatcattaatctttaattggtactctgtcatttgtttattcctccctatagtttataatattttttgcaattatagatttaatattcataaatgtttcaatcaaaacaaaaaaacaaaaatggatggtttaaatataataaaaccaccctgtacattcataattattcaaaaaataaaatggctccgcgaaaaggattcgaaccttcaacctatcggttaacagccgagtgctccaccgttgagctatcgcggaataacattttacccggcaatgacctactctcccacagggctgcccctgcagtaccatcggcgctttggttcttaaccttcgtgttcggtatgggaacgggtgttacaaccaagctatggtcaccggattaatttatttagttttcgaaagtactttgtactttcaaaattgcatagtaatcttaatatatttacctttatattggtcaagccctcgacctattagtatcagtcagcttaaaatgttaccattcttacacctctgacctatcacctgttgttcttacaggggtcttactaacttatgttatgggaaatctaatcttgaggtgggcttcacgcttagatgccttcagcgtttatcccttcccgacatagctacccagccgtgcctttggtaagacaactggtacaccagaggtcagtccatcccggtcctctcgtactaaggacagctcctctcaaatttccttcgcccgcgacggatagggaccgaactgtctcacgacgttctgaacccagctcgcgtgccgctttaatgggcgaacagcccaacccttgggacctacttcagccccaggatgcgacgagccgacatcgaggtgccaaacctccccgtcgatgtggactcttgggggagatcagcctgttatccccgaggtagcttttatccgttgagcgatgaccctcccacgaggtgtcaccggatcactaagcccgactttcgtctctgctccacttgtttgtgtcgcagtcaggctcccttctgcctttgcactctacgcgcggtttccaaccgcgctgagggaacctttgggcgcctccgttactttttaggaggcgaccgccccagtcaaactgccctcctagctatgtcccgtgaccagtttcatggcctccggttagaaccccagtactgtcagggtggtatcccaaagacgactccacaatccctgacggaactgcttccaagtctcccacctattctgtacagacaataccgagattcaatgctaagatacagtaaagctctacggggtctttccgtccaatcgcgggtagcaagcatcttcacttgcactacaatttcgccggatttgctgttgagacagtgcccaaatcattacgccattcgtgcgggtcggaacttacccgacaaggaatttcgctaccttaggaccgttatagttacggccgccgtttactggggcttaagttcatgccttcgcttgcgctaagcattccccttaaccttccagcaccgggcaggcgtcagctcctatacttcagctttcgctttagcagaaacctgtgtttttgataaacagttgcttgggcctattctctgcgacctactctcgtaggcaccccttctcccgaagttacggggtcaatttgccgagttccttaacagcaattcttccgatggtcttaggattctctcctcacctacctgtgtcggtttgcggtacgggcacagagctcctggatagagacttttcttggcagcatgaaatcagatatttcggtagtaaactacctcaccattacaccccagacttaacgaaagacggattttcctatctttcatcctcagtgcttagacgtacttccaataacgtacgcatatcctatcctcctgcgtcatcccatttctcataacgttactctgcggtatcggaatatcaaccgattgtccatcacctacgcctttcggcctcggcttaggtcccgacttaccctgggcggacgaaccttccccaggaaaccttaggttttcgaccactaagattctcacttagttctcgctacttatgccagcatactctctcctgtacagtccaccgctcctttcggtacgacttcagcccatacaggatgctcctctaccacttgtacgaagtacaagttcacagcttcggtgttagattttagccccggacattttcggcgcaggatctcttgactagtgagctattacgcactcttttaatgtatggctgcttctgagccaacatcctagttgtcttagaaatcccacatcctttaccacttaatctatactttgggaccttagctggtgatctgggctgtttcccttttgactacggatcttatcattcgcagtctgactaccatgattcaagtatccagcattcggagtttgataaagttcggtaactgttgtcagcccctacctcattcagtgctctacctccggtactcattcatggcgctagccctaaagctatttcgaggagaaccagctatatccgagttcgattggaatttctcccctatccacagctcatcccatggtttttcaacaccattgtggttcgggcctccacggaattttacttccgcttcaccctggccatggataggtcacccggtttcgggtctacagcatgcaactatacgccctattcagacttggtttcccttcggctgcgcaccttaagtgcttaaccttgctgcataccgtaactcgctggctcgttctacaaaaagcacatcatcacacattaacgtgttttgatcggttgtggacacacggtttcaggttctatttcactcccctcctggggttcttttcacctttccctcacggtacttcttcactatcggtcactaggtagtatttagccttgggaggtggtcctcccagcttcccacaaggtttcacgtgtctcgtggtactctggtacagatcgggcttttttctctttttacctacaggactattaccttctatggtttaactttccagaaatcttcggttaagatataaagccttaatgatctgaccgcaaccccggaaacaagtttccggtttgggctctttccgtttcgctcgccgctactaaggaaatcgatttttctttctcttcctccaggtacttagatgtttcagttccccgggtttacctctatatacctatgaattcagtatacagttcatggggttacccatgagagtttcctcattcggaaatcttcggttcacaggctatttgcgcctacccgaagcttatcgcagcttatcacgtccttcatcggctcctagtgccaaggcattcaccatgcgccctttgtagcttgaccttaagtaaatatatttaaattcaaacaacaaagaattaactttgccttgctttagagtattactctatattgattactatgcaattttcaaagtacaaatttagagagaattaaactctcaaaattaaacagagaacaaagaaccttcatggaaattacatttccatgtcgactccttagaaaggaggtgatccagccgcaggttctcctacggctaccttgttacgacttcaccccaattatcaaccccaccttcgaccgctggttccaaaaggttacctcacgggcttcgggtgttgccgactctcatggtgtgacgggcggtgtgtacaagacccgggaacgtattcaccgcgacattctgattcgcgattactagcaactccggcttcatgtaggcgagtttcagcctacaatccgaactgggatggggttttgagttttgctccaccttgcggtattgcatctttttgtccccaccattgtagcacgtgtgtagccctagacataaggggcatgatgatttgacgtcatccccaccttcctcccggttaacccgggcagtctcactagagtgctcaactaaatgttagcaactaatgataagggttgcgctcgttgcgggacttaacccaacatctcacgacacgagctgacgacaaccatgcaccacctgtcatcctgtccccgaagggacttcatccattacggactaattcaggagatgtcaagtctaggtaaggttcttcgcgttgcttcgaattaaaccacatgctccgctgcttgtgcgggtccccgtcaattcctttgagttttaatcttgcgaccgtacttcccaggcggaatacttattgtgttaactgcggcacagaaggagtcgatacctcctacacctagtattcatcgtttacggcgtggactaccagggtatctaatcctgtttgctccccacgctttcatgcctcagcgtcagttacagtccagaaggccgccttcgccactggtattcttcctaatctctacgcatttcaccgctacactaggaattctgccttcctctcctgcactccagacatccagtttgaaatgcagcccccaagttaagcccggggatttcacatctcacttaaatatccgcctacacatcctttacgcccagtaaatccggacaacgcttgccacctacgtattaccgcggctgctggcacgtagttagccgtggcttcctcctatggtaccgtcattatcgtcccataagacagagttttacgatccgaagaccttcatcactcacgcggcgttgctgcatcagggtttcccccattgtgcaatattccccactgctgcctcccgtaggagtctggaccgtgtctcagttccaatgtggccgatcaccctctcaggtcggctacgcatcgaagccttggtgagccgttacctcaccaacaagctaatgcgccgcgggtccatctcatagcgaataaatcctttggctcaagaatcatgcgattctcgagtattatgcggtattaatcttcctttcgaaaggctattccccactatgaggtaggttacccacgtgttactcacccgtccgccgctgggaaccgaagttccccgctcgacttgcatgtgttaagcacgccgccagcgttcgtcctgagccaggatcaaactctcaatttaaaagttttgatataatacagatgctaatctgtattcctttagctcatcgctaaatttatttaaatagaataaattctattcaaaagaattgctggttctttaattctctgtttaattttaaaagttcaattgttcgctgcactcagacagcttaattataataacatctacatttaatcttgtcaactacttttttcgtttttaagattgaatgttgtcgcttagtgcggcgacatgtaatataatatcacatagtgtattatatacttttattattaacatcatttaagataaatatacctctttctctctgtttttttacattatactcaatatttcttatattgatactcaaggagtagtttatgacataattttgaaaataagaccctaaaacgacaaaacaaggtatactaaaaaacaaatataaacttagtatgccttgtttttaccttcttatactattatataaaaaaaagagcagccatcactgactgttctttttggtggagaataagagattcgaactcttgaccccctgcgtgcaaggcaggtgctctcccagctgagctaatcccccatggtggaccttcagggactcgaaccccggaccgaccggttatgagccggttgctctaaccaactgagctaaagatccatttcctagcaacaatttaaatattgttagttaaatcacttgctaggctaaaccgtagcaaacaacttacagtaagatattatagatcatttaaatatgtttgtcaacagtattttttaaaaaagtttaaaatttatatttttttgtttttcctactttaagttgtttactatttctttaaacttattacctctcacttcaaaattaggaaaagaatcaaagcttgcacatgctggtgataatgttacaatatccccattagtagctacctttttagcttcacatacagcctcttctaaattatctgatagtattataggtaattttatatttttctcacaaataaccttgtcaaaagtttcttttattttattctttgtagctcccattaaaattagtacctttattttgtcataccctttttctgcaagtggctcaaaaggaatgtgtttatcatatcctcctgctataagtataactggtctttcataagcattaagtcctgaaatagttcttgtaggacttgatgctattgaatcattataatactttactccatctaattctcttacaaattcacgcctatgctctactccagcaaaattcattgctacttttatcatactttcttttgacacatccttgctcactgcacaaaacgctgccataaagttttttacattatccattccctttatttttatatcatccttgttgcatattttattttcaaataaatatatatttccatcttgtttattataatatgctccatttttgaccttttcgtttctgctaaatttcaacaaatctcctaaagcttcgctctccatattatttgttatttcgttgtctctgtttattatcagaacattacctttgctttgatgggtaaatatatttttctttgcatttatatattcctccatgttcttgtgtatatcaagatgattaggactaagatttgtaacaactgctacttcaggtgaaacatctattgtcataagttgaaaactagataattctaatactactttatcctttgtagaaacctcttttatttttgaaaacaaaggtgttcctatattacctccaacccacgttttataaccttcttctttaagcatattatatataagtgtagtagttgtagtctttccatcgctacctgttacaccaaaaattttagctgggcaatattttataaactcttccatttctgatgttatatatgcaccctcttgttttgctttcactaatgcttcgctgtctattctcatggacggtgttttaaatactacatcaaagccttttaatgcagataaataattctctccaagctcaaactttacgttctcacttgaaaattcattaattacttcatcacctaattcttcttttgtttttctatcaaacgcagttatctcagctcctaatttacttagaaaatgtataagtggtctattacttattcccattccaacaactgcagtttttttattttttataaatttcacaaattcattaaaatctcttttcatatcgctaaatcctcccatttcagattcaattatatcactttacaaaactataacaaatagaaattttacatctaaaatattaacagtaattgctttatagtgacactttacataaaaaatatatattttttatgtaaagtattgaaaaatattaatatattgtgctataatatagaagtgccgtaaggaaaacattaatataattccccaagttttaattgaacatataacatatccccatgattaaaccctattttgccggattttagtatccggctttttctttttgtacaagcttttaaaataaaggactttctatattacaaacctcaacagtttttataagaaaatcctttactttattaaataatctattttattttttcttctaagtatttttctaactcttcaattttaactcttacctgactcatgctgtctctatctcttatagtaaccgcttcatcttctaaagtgtcaaaatcaacagttatacaataaggtgttcctatttcatcctgtcttctatatctcttaccaatacttcctgtttcatcatattcaatgttaaatttagaactaatcttactatatacatctaaagctttttcagataacttcttacttaaaggaagaactgcagctttaataggtgcaatttgtggatgaaaatgtaatactattctttgatctccaccttcaagttcttcttcatcgtaggcatcaattaaaaatgcaagtgcaactctatctgctcctaaagaaggctctattacatatggaacatatttctcattagttgatggatctaaataattcatatcctctcctgaatggtccatatgtttcttaaggtcataatctgttctatcagctacgccccaaagctcgccccaaccaaatgggaatttatactctatatctgaagttgctttactatagaatactaattcttctgctgaatgatccctaaatcttaaattttctttattaatgcctaaatccaacaagaaactccagcaataatctttccaatatttaaaccactctaaatctgttccaggtttacagaaaaactctaattccatttgctcaaattctctagttctgaatgtaaagtttccaggtgttatttcatttctaaaagctttacctatctgtcctattccaaaaggaactttttttcttgatgatctctgaacatttttaaagttaacaaatataccttgtgctgtttctggtcttaagtatatttctgatgaagcatcttctgttactccttggaaagttttaaacataagattaaactttctgatactagtaaagttctctttaccacatttaggacatttaatatgtttatcctttatgaagttttctagtttttcatttgaccatccatcagcactcgccacttcggctccctgctctgttaaatagtcctcaacaattttatctgctctaaaccttgatttacattctttacagtccattagaggatctgaaaagcctccaagatgaccagacgctacccaaacttcgctgttcattaatatagcacaatcaagtcctacattatatgtattatcctgcacaaactttttccaccataatttttttacattgtttttcagttccacacctagaggaccataatcccatgaatttgcaagaccaccgtatatttcagatccagcaaaaacaaatcctctatttttcgccaaagaaactattttgtccatagtcttttcatctttcatttgcttttacctcctaatataattttataaaaataaaaaagactatcacctcaaagggacgaaattacttccgcggttccacccttattggcaatagccctgcttttcttttaaaaatactcgaaagactccactactgaattttcttgaccgtttacaccctccacagcctctctttgaagaaaatacaatttctatctttgtcattgtatagatattaaattatcaaaaaataaaatggctccgcgaaaaggattcgaaccttcaacctatcggttaacagccgagtgctccaccgttgagctatcgcggaatgttccatgtcttgactacgaatattattatatcatatccacacataatgtcaacactttttttaaactttttttccttaaatcatatttaatagctttttttcaattagttacataggtatagcattccaaagcacccataaataaaagacggcagacactatttaagctttctgccgtcttttattactaatctctatttggtgttggtttcattgttgggaataatattacgtctcttatagatggtgaatctgtaaggaacattactaatctatccattcccattcccattccccctgtaggaggcatacctatttcaagtgcatttatgaagtcatcatccatctgatatgcttcatcgtcacccaattctctttctttaagctgctgcataaatctatccttttgtactataggatcattaagctcagaatatgcattacatatttctctaccatatataaatccttcaaatctttcggtgtactctggatttcctctctttttctttgtaagaggtgaaatttctacaggataatcacatacaaaagtaggctgtattagcttcttttcaccatattcttcaaataaagcgtttagaatgtctccctttgtacaatcttttaattccttctttaactctaatttcttttcttttgcaatttcccttgcttcctcatcagtctttactgtagaaaaatctattccagaatgttctttaactatatccaccatagttactcttctccatggaggtgttaaatctatttccgttccttcataagttatttttgtagttccatttactttttgacatgcatatgcaaccatattctccgtaatttccatcatatcattataatcagcatatgcttcatataattcaatcattgtaaactctggattatgtcttacgtctattccttcatttctaaagtctttacctatttcgtaaactttttcaaatccacccactattaatctttttaaataaagctctgtagctattcttaaatgcatatctaaatcaagagcattatggtgtgttgaaaacggcctagcagatgcaccactagcaatagttgacaatacaggtgtttctacttctaaataatccttattatccaagaactctcttacagcctttataattgctgttcttttcatgaatgtttctcttacatcttgatttataattagatctacatatctttgtctatactttaaatctggatctttaagtccatgaaacttttcaggaagaggttttaatgattttgcaataagctcaagcttagttacatgtaaagtaatttcccctgtcttagttttaaaaacttttcccgttattacaacgaaatctcctatatcgaaggttttaaattcttttaatttctcttctccaacatcgtcaattttaagataaagttgtattttgccgtatctatcatatatgtcggaaaatcctgctttaccgtgaactcttttcgacataagtcttccagctacagttacaattttatcctctagctcatcataattatcaacgatttgttttgatgtgtgtgttctttcaactttatatacatcaaaaggatcctttcctctttcttgtgcatcggaaagtttttgccttctctcttttaaaagatcgttcatcttagcttcttcttttgcttgaagcttaattgccttcatttcttcctttgtcaattgcttttcatcatttgacattactgtatcccacctctacttaatagctaatattttatatttatcaacaccatcaggcacattaacctctatctcgtctcctacctttttaccgataagagcactgccaacaggtgattcattcgatattttgttttctataggatcagcttctgcagaacctacaatcgaaaactcgatttcctcgtcaaattgataatctttaaccattacctttgacccaacacttacaacatcatttttgagctcactctcatcaataacgttagcattcttcagcatattttctatttgggctattcttccctctacaaatgcctgatcatttttagcttcatcatattctgaattctcacttaaatcaccaaaagaaagagctaccttaatcttctcagttatttcttttctttttgtagtttttaaatattctaattcttcctctaatttttttacgcctttataagtaataacatattttttttcctgactcattgtttttctcccctctacaaaaaattgaatcataccccagattattgtaacagtatatattgaggtaattataaaacagcattattgcattgtcaatatatattgttttatatatgtttattcctgtgcataattttaattacaatttttaaagaaaatcttttctatactgctcaagaataccaataacctcatcactgctttcctctgaatttattaaacattttatatctgtacaattttttagtgattttatgtaccatgctatattttttcgcatttcacgtactgcttttttttcaccataatattttactgcttctttatagtgaaatatacacatatctaatttttcaactggagtaggttttatgatttgcgttgaattaatcgcagcttttatctctctaaatatccatggatttcccattgcagctctagcaaccatcacaccatcacaattagtatattctaacattctaacagcatcttctcctgatactatatctccatttcctattacaggtatactaactgattttttgaccgcctttattatatcccaatccgcttttccttcatacatctgagctcttgttcttccatggactgttatcatgtctgctcctgcatcctctattaccttagcaaattctacagcatttatattatcttcatcgaaaccttttctaaactttacggttacaggtttattggaagcttttttaactgcttttacaatctcatatgctagcttagggcttttcataagtgcagatccttcaccatttttaactattttatgagcagggcatcccatgtttatatctataatgcaaattttatcatcttcattgaatttttcacatgcctttgccattatatctggttcactcccaaacatttgaactgcagcatactcttcttcatctgatatcttcatgagttcttctgtattttcacttccatagtaaagagcttttgcacttaccatttccgtatatgtaagatctgctcccatacctttacatatctttctaaatactatatctgttactcctgccatcggtgctaaaaacacatttccttcaaaactaagattacctaccttcattagatcaccttaactctatttttttcatatattattctgagcccttccaaagttaaaaaaggatttattacatcaacatttttagcctcttcacttataagttttgcaagaccacctgtcgcaactacaagaggttctttttctccttcctcctgcagttcttccttcattctttcaactatgtatcttacctgacctatgtatccataaacaattccagattgtatacttgaaatagtatttttacaaatagcatacgctggttttatgagctctactcttggaagcttagctgccttttcaaaaagagcctctgatgaaactttaattccagggcatattgctccaccaagataatctccattttctcttactgcacaaaatgtagttgctgttccaaaatctattattataagagatcttttataaatttcatgtgctgctacagcatttacaattctgtcggctccaacttctttaggattatcgtatttaatattaattcctgtttttattccaggtccaacaactaatggatttatcttaaagtactttcttatcatatgttctaaagaatacatgatattaggtacaacagaggatattattactccctcaactaatgttggatcgagcttatcttgttgaaataagttcattacttgaattccatattcgtcagcagatcttaatacatctgttgatagtctccattcagctgtaagtttcgtatcattgtatattcctaacactatattagtattgccaacatctaaaactaaaatcacttttaatacactccttaaaaataagagcagcataaaagctgctctcttatttcaaagcacttatattgaaaaattcaataaagttattttatcaatttcaaaatgtatggtcaagtaaattttaaaataaacctactatagagccatcttcaaatatatccattttatttgcagctggagtctttggaagtcctggcatagtcatgatatttccggtttgaactaccacaaaacctgctccattagatactcttacttccttaacatttatagtaaagttagttggtcttcctaaaagagctggattatcagataaagaatactgtgttttcgcaacacatatagggagtttatccaaattaaatttctcaatttcttttatctgtttgtttgcttgaggagtatactgaactccatctgctccatatatttctttagctattatatccattttttcttttatacttagcttttcatcatatagatacttaaaattgctcttttcattttctaaagtgtctaaaaccttatttgcaagatctgttccaccttctccgcctttttcccaaacttctgtaagcgatacctttactccctgtttactacagtattcttcgatgcattttatttcttcttcactgtctgttataaatttatttattgcaacaacaacaggcacaccgtatttctttatattctctatttgtttacctaaatttgatagtcctttttcaagaacctttgcatttggtttacttaaatcctcctttagtgcaccaccgtgatgtttaagtgctctaattgttgcaactaatacaacgcaatcagggtttaagtttccgtacctacattttatatctaagaatttttcagctcctaaatctgcaccgaaacctgcctctgtaataacataatctccaagcttcaacgccatctttgtagctaagatactgttgcatccatgggctatatttgcaaaaggtccaccatgaattatagctggagtattctcaagcgtttgaaccaaattaggcttcattgcgtctttcataagcatagccatagcaccttcaactttgagatccctacaatatactggattcccatccaaatcataggctattagtatctttcccattctctcttttaaatccataagatcatttgccaaacaaagtatagccattatttcagaagcaactgttatcataaaaccgtcttctcttggaaaaccatttacttttcctccaagaccaactactatacttctaagagctctatcattcatatccataactcttttaaatactattcttctttggtctattttcaaactatttccttggtgaatatggttatctatagctgcgcagagtaaattgtttgctgaagttatagcatgcatatctccagtaaaatgaagatttatatcttccattggtactacttgagcgtaaccgcctccagcagctcctcctttaataccaaaaacaggtccaagagaaggttctctaagtgcaatcactgtattcttgttcattttgcatagggcttccccaagtcccactgtaactgtagattttccctcaccagctggtgtaggatttatagcagtaaccaacaccaatttaccatcttgtttgttcttgttttgtttcaatacatctagcgatattttacacttatatttaccatataaatcaatatcgtcttcatttaaaccaatcttctctgctatttttactataggttccattttagcttcttgagctatttcaatatcagttttcatgagttaaatgcacccctttttatatgtaataaacttaaaatataaactacttatattaacctttactattataccataatatagtgaaaaaaatagcgataagttaagagaatggtaataagtttattatttcaataatattattatccattctcaaattacttatcgctattttagtatattaagcattttcaaatatttctttaaactcatcagcttctaacttttctttttcaagtaaagccttagctactgcatcaagttttgacatattatctttcaatagattctcagctttagtatatgcttcatctattaattccttaacttcattgtctatcttagctgcaatctcttcactaaagtttctactagttccaagatcccttccaaggaatacttcgtcttgatcctttccaaaggttatagttccaagtttgtcgctcattccgtattccataaccatttttctagctatactagtagctctatctatatcatttttagcaccagtactaatatctcctattactaacttctcagctattcttccaccaagaagcccaaccatttcatctttaagtttattcttagacatgtatgaactatccttttcaggaagatgcattgtatatccacctgccatacctctaggaactatgcttatttgatgaactgggtcagagtaaggtaaaagttccatcaatacagcgtgacctgcctcatgataagctgtgatctttctatcctcttcacttattaccctgctcttcttttctggtcctgcaataactcttgtagttgcttcttcaagttcttccattccaattataggctttttatttcttacagccaaaagtgctgcttcattcattaaattctcaagatctgcacctgtaaatccaggtgttctcttagctaaaacatctaaacgtattgaatcatctaaattcttatttttagaatgaactttaagaatttcttctcttcctttaacatctggagcaccaacaagaatctgtctatcaaatctacctggtctcaagagtgcatgatctaatatgtcaggtctattggtagctgcaagtattattataccttcatttactccaaaaccatccatttcaacaagaagctgattaagagtttgttctctttcatcatgtcctccacctagtcctgctcctctttgtcttccaactgcatctatttcatctataaaaattatgcatggagaattcttttttgcctgctcaaataggtctcttactctagaagctcctacaccaacaaacatttcaacaaagtctgaacctgatatactgaaaaatggcacacctgcttcacctgaaactgcttttgctaaaagtgtcttaccagttccaggaggaccaacaagaagaactcccttaggtatcctagctcccatttcaatatacctcttaggctgttttagaaaatcaactatttcttccaattctcctttttcctcatcagcccccgcaacatctttaaaggtgactttttgctttaaatcatcaggtgatgacatttttgctctactttttccaaagcccattacgcctttacctgtaccaccttgtgtttgctgcatgaaaagcactaatattacaaccatagccaaaatcattattatagttggcatccaacttatccaaacaggtatattggctggtgcggcatatgattcacctatttcaccattagtaggatgatccgcaagaaattgattgagtctttctaaaggcacgatagtttcaaaagatgaaccatctttatatttaccatcaactgtcatcttatcgtctttcatttcaaaactttttatattatttcccatatactgcttttgaaattgatcaaagcttacagtattagtagccttaccaccttgcactagcatcaaaatagtaaaaatgaccactaaaaacactacaatccagaccgtagcactagaaatttttttcaatctaggcccccctctctatgtatataattgtgttatttaaagattgtatcataacaaaaaactgtttacaatataatattccattaattattcatatatttcatcttttagtatcccaatatatgggagatttctgtatttttctgcatagtcaagtccatatccaactaggaaataatctggcactatgaatcctgtgtattttacatttatttcaactcttcttctttctggtttattaagtaatgtaattatttctatgctgtttggtttcttccctgatatatgtcccataagatattttagtgttactcctgagtctattatgtcttcaactatcaagatatcttttccctcaacatctgaatctaaatctttaagtacctttacaattccagatgttgatgtgccattaccataacttgaaactgacatgaaatctatagcacaaggaatgtcaatgtattttacaaggttacccataaaaacaacagaacctttcaaaataccaataagtataagatcctttcctttgtaatcctcacttatctttttgccaagttccttaactttttcgtttattttctcttcgtcaagcaatacttctttaatgtcttctctcattattattcctctctttcaatttttatttctaatatttttttagtgttgttatctattttaaatttttcacttattttaaaccctgttatccaagctatttcaccaccaaaacatatgagaggaatcttatttctttcttctctaggtatttttaaatttataaatatatcctttagttttttattatttttcataccaaaaggcataaacttatctccttcagatctgtaccttaaagttatatattttcccgctttatctgcatcaaaatattttacatttttgtttccctctagtcttatatcttttgaattatgtattaaccttattcctataattaaattttcctcgtgtacagaattaagtttatccatatgaagattatactcttttttacctatgcagctttcatcttcttttatcctaaggcaaatatcaccatagttattatatgccctcatattattgggtagatttatttgctttcctgtagtatttttctggcatcctataatactgtcaatgtgtttcttctcaagattatacttactattgactaaataaaatacagctcttcttataattcttgatagtattgccgtatcattcgaaaatgcctctttacttattataacctgtttttcacattcattacaatacaacttatactttgattttgcaagtttttctaaataatcattgtcaatggtaacaagctctcctaatctgtttaaagcacccactatatcctcattaaaattcttcactatatatggtattaaatctaagcggattttatttctattataatccctctcgagattagtagcatctatcctaggcataagcttttcatcttcacaatacttttctatggaagatcttctaatttcaataagtggtcgtatatagtatccatctctaacaggccttattcccttaattccttctgttcctgttcctcttattattctcatcattatagtttcagcttggtcgtttgcattgtgtgcaatagctattttatttgccttaaacctttctttaacctcctcaaaaaatgcataccgaatctctcgtcctgccatttccgaggatatctttttttcatgtgctattttatttacgtctactcttttcacataaaattgtatatctagtttctcacaaaattttttcacatactcttcatctttatctgcagcttcacccctaatacagtgattaacgtgtgcagcgcaaatggatgtattaaatttatccttaagcttaaatagtatatgaaggagacaaattgaatctgggcctcctgaaactgctacaacaattctatcgttttgtttaatcatagaatttttttctatggtattgataacatcatttatcaacaaaaacactcccataatatatttatgctttataattatatcatatttttacaaatactttacctcaaattaaaaattaatataagctgtatactttagaaattattatggttatatcatcctttgcttttccaccagaaagttctatagctttttttagcatagcttctcctaactctttaggcttatttgcactactatttttaagaaaatctattatccaatttacttttccagcattctcgtcatcataattaactacgccatcacttatcattactatcatgtctccattttcaaccttcttgtgattaacctccatatcaactgtatcaagtactcctataggaagtgtcttagcatttataacttcaattttatcttttttctttataaaacttgttactcctccaacctttataaattcagcatcaccagagtataaatccacgctacacaaatctaccgttgaaaatttctcatcttcttcaaatttaagcgtcattatagagttaactgtatttatagccatagttctattaagacttgattcattaaatttttctattaaatcaataactgctctactttctttttccgcttgaactccatgtcccataccatcacttattattatattatagtttccatcttttccttttccaaagctataactatcgccatttacctcttcaccatctttgcaagctcttactatttgtgaggatatataatacttaggcgtctcctcaaaagtaacactgcataaattagtttctggacatatactgcatccatcatctcctacacacataagcgttcctacagcctcattaataactggaagtacatgtttaacacaaatctgtcttcccccacacgcttccattgtaagctttacaagatttctgtttcttttatcatttacacacattatatccttatatggtatccccatcttatttagcaatcttattattttctcctctacatcaacattaaactttaattcattgctaaattcatctattatattctcaacagatgtacctatattcttaacctgagcggacataaattctcttccactgcatacctgcattctccacatctcgttcattatatagtcatttattatcatgtccgtatgctttataagctcttttctcctgacacattttctctcaatctcatcaggaattttatttataccctcctgaaaattttgtataagctcttcgaaggctgcataagtataatatatctctcttttccagcatattgagttcatattacactttccgcatactctatcggccaaattttcaactagtctgcaactcttattcttcattgtaagtttgtcattgtcagcaagattatttagggtagtagacattgtaaacaaaacttctgaaaaattctcaagctttttaacaaaaatatccttcatcttttcaatatatctattagtaatatctgattgctttctatcccaattaaactcacactccattttcttgtaaagcttattaggtatccccgcaaatataatacatgttatagctgcttccattaggctaaaatcaacatgattcttacaataaataattattatcaaaaatataataagatatactcctgcagtaatccactttccaaaatccttaaaaactcctgctataaatcctaaaaatccaaatactcctatataaatcattacatcgctgctattcataccaatgattgctccaatagcaataccaccagctgctcctgctgaacttccctctatatatgaaatagcaattacaaaaaccatagctaaaacgtttcttatcgatacattataaatatcaaaatttcttgttcctgaaataactaaagccaccaaaactgacatgcttattatctcttcatttgtaaaaagatgttttgttcttatgttatcaaggcatataattccatacctaataatataatatactgaacaaacacatgctatctcaattaaagtaaatataagtgctgattgtactgttaatttttcaacaagtattttaaacataataaattctatcaataaaaatattgccgaagttactaacttctttatatcttctttttctttcataaccaccataagcagcgtaataataattacaccaatctcatacataacgctatctttcacttcaccgctaatcgatatataaccaaccaaacttcccacagctgctaaaaacgaagctttatcattcttcttatatattaaaacgcatgctaaaaaagctattccgaatggtaccatagaatttatcattacaactctacttatagcaaatgaactcactgcataaattaatacttttaatataaatagtttttttatattttctacttttgtatctttttctgatttaggtgctctttcatatgtaataacttcactattatatagcatatcaacatccccaatctataaaccacatattattctatttcaaatagcaatatgtaagtaatttccatatccagtttatctcctattatatcaaatgcttttggaaatgtttgtcaattgttggatgtttattttattttttttaagacatttatccctacaataatttataaaatttagttaaaataaaattctacataacataaaaaagaagctttcacatacttgtgaaagcttcttgacttggtagcggaaataggacttgaacctacgacacttcgggtatgaaccgaatgctctagccagctgagctattccgccatattatggttgcggggacaggacttgaacctgtgaccttcgggttatgagcccgacgagctgccagctgctccaccccgcgatatttatattggtgccgaagaccggaatcgaaccggtacgatgtgattagcatcgcaggattttaagtcctgtgcgtctgccagttccgccacttcggcatgtcactcatcagcgacaataactattatatcccatagctatatagatgtcaacaataaatttaaatttattaaataaaattttatatattagtattttaaaacacttatttctttcatcaaccagcttttatcaaggcttatacactatcgtaatataatataaaatatttaatcttctatctctttttctgtactttttcacaagaaaaaataaaacacggattttatcccgtgcttaaattcatattttaattaatgacttgtgtttttcttatatcctcttgttcttgaatcttgatgcctttttaaatcctggaatttctcttcactatccttcaaaaatcttgatagcttatcttcaaaattaacggcattttgagtatttttcttttcccagtcaatttcaataggtttaactgattttttgtgatcaatagcttgctttattgataaacttatctttccattatcatctactgagagaacctttactttaactttatctttttcttttaaatgatcatgtatatccttaacgaacgaatcagctacctcagatatatgaactaaacctgttttaccatcaacctccacaaatgcaccaaaattagtaatgttaacaatagtacctgttaagatacttcctgcctttaaggtcatataaaaagactcctccttgatatttattgtgtattattatatttttacttcttactatctattacagggatttcgccttgttttataagacctaatttttctcttgcaagcttttcagtataactatcagtcttagataatttgatttcatcctgtaatttttgattttcctttttcaaaccgtcaatattcttttgactttctgaaatgtttttatttatcctgtttatggttatttgttgatttacaaaaatatagcccatattaatcaatacaataaaaaaaactatatatttgatttttgaactcaatttcatttttgtactcaattccccttcaaggttataaattttattaaaacacctatatatatattttaaaagctttttgtcttttgttcaagatatttatgtttattttttgcttaaaaataaacactcaagaatatatataataaatttaaacaatattctaacacattttagaaactgattaaggaatttccttatgacactcacaaacagaggacttataaatttaatataaaagcataatccaagtattatgaacacatatacatacgcatttatgtaagcttcatttgtgtacagtaaaaacacgaaaactactatagcatctagaactagaaataatatatcttccaaaaaagtcacaattttattaggatgttcacatacaagcaaaaccctatatacatcgaataacaatgctgctataactccagcaacaaaattagatataaaaaatattaattgttcataaattgataaaatcatatttataccctatttaaacaatctagatattatactatcttttttattggaggattcattaccgctgtatacgcaggcatttatagttccagttatagctatatcaccattttgaacatctaatttattcattttaagctctctgccttttattataagtgatcctaaattagtattaagaactatttgttcatcattaaaattaacaacttcacttactcctgtaagtaaaagtctttttctattttctatagtcattaaactttttttaccgctttgtgcgtttaattcctttttaacttccatataaattacctcctatcccactttttaatatatatgtgagatagaaagattttataacattaaatttcctcaccactaattacttcatacatcttttttgcatcttctttaagagcatgattggtaatgttaactacttttgctttaaagactttgcttgcatatcttatttctattatatcatcttcttcaacgtctgtaccaggctttgctactttgccatttatagatacccttccgctttcacaagcctctttagcaacagttcttctctttattatccttgaaacttttaaatatttatctaacctcatactaatcctccgataaaaagtatagtattaaatcttatataaaatcttaaaaatcccggttaataaccgggatttccaattttaagataattatttattaactctttccttaaattcttttcctgctttaaaaactggaacagtagaagctggtattactatctcctcttttgatctaggatttcttccctttctctctgctctttctctagtttcaaaagtaccgaaacctactaattgaactttttcatgtttctctaaagtttcttcaacactttctataaatgcttttaatgcaacttccgcatctttttttgttaatttacttttctctgatatactagtgattaattcagccttattcacttttgttacctccttaaattttaagagtatgctataaccatataagcatattctgcatataatataaaaatccttcttttaaaggacatttttattgaatttttagttttgcttcatcccataaagcattcatttcctccaaagacatgctctcaattttaagatttttatccttggctgctttctctatgtaataaaaacgtttaataaatttgtctatagtataatttaatgcaaactcactatcaatgtcaaggagtctagcaatatttactacagaaaaaattaaatctccaacttcttctgctattctatcccttattatccctttatatacatcttttacttcgcgagtttcctctaaaactttatctagcgcctcttcaacattacgaaaatcaaatcctacttttgaagcctttttttgaactttttcagcccttataagagctggtaaaattttgggtatgtgtttcatttcttcagtataagaatttaaatcctgttgttttctttttatttcgtcccacttttgtaaaacttcagtagaattttttatttgctcatttttaaaaacatgtggatgtctttctatcatcttgttacaaatccctgaaatcacatcatttatgttaaagtacccttcatctttacctatcttggcatgaaaaaccacctgaaataatacatcacctaactcttctaccatcatatcatcatcgtttttttcaattgcctcaacagcctcatagcattcctctataagcgccctctttattgtatcatggctctgttccctatcccacggacaaccattttctcctctaagtatttccattatatttaacaaatcgtaaaaatccttattgttattaatatcacaaggaacatacactgatgttagataatctatatcactttgtctatccaattcatatagaggtatttttctaacgctctcttcattttcgattccagctgctctcacgaaataaatctccgtatcgtctttataatactccaaaagagctagctttacatcagaagctataaaactattatatacttgagtaatgacaattccaagcctcttatccaaaatttgatttttaatatcaaaggcatcaactattttaagacctttcaccggatcaatcttaagcgattccatcaaggcatctataaagcttacagctggaactatatcaacttttatattttctttttcacataattctattaatatctgcactgatttctctgcaacaagaggatgacctggcacagcatacactatatctttaagctccttagccttactaaccaaatcccgggctataaagtcatatacctcatcaaagctttcgcctgtttcgtacttatcatcatatgtactgtactttataccaatttcatcaaaatactctaccactggatgctttttagtcctaaagaaaatattttgtgaatttttaactgcctcaagtgttccgagggtcagtgcatttttcgagccaggcccaagccccactactttaatcaatattaaatcctctcccttcacctaaaacttttaaatctagtttttattctcttataatcgaatacaccaaacagaataataaatataaaatacactattattcctgaaaatactgatataccaaagctaagtaacatattcatagttttagtataaatattcatatataagaacataactcctataatcatcaaaatagatgcgtacgccggtttcattattatatcataccattttattttaaaattacaaattattttaacagcaattacattcaatatacaggataacatatatccactaatagtgccaataactgctccgtaaacattgaacatctttataggaactaaatagttatttattaccaccttaagaatacaagccaaaaacagatttatgacagggatagcatattttttaactccctgaagcaccgatgtagtcacctgtgaaagtacgataaaaggtatactaatacttaagtattttagtatatctccaccacttgaatgtccaggaaatattattgtcataacttgattagacataaaaaataaacccgcaaaagatggaatagctattaacattgacatctttagagctgattctattctaccttttaattcatccattctattaagtacaaaagcctctgaaataactggcataagagatgtacataaagcaatagaaagtgtaagtggaacattaataagtacaaaagccttacctgtaagctgaccatataatttagttgcctcactatagttaaatccagctttaattaggttttgtggtactaatatggaatctataagactcattatactgctaactgctgatcctattgatattggtattgctatgtataataattcacttaatattttataatttcttcctgtctttacgcccttaaactcacttttagctctagtatattttatgaataaatatacaccagcaatccctgccccaaatactgctccaaaagccgctccccctgcagagtactctattccttttggcaaaagtatgtatgcaagtccaactcctactaaaactcttcctatttgctcaattatctgtgatactgcggtaggcaccatattctgcataccttgaaaaaagcctctaaatgagcttaccagggatattataatcggcgctaatgatatgcctattaatgaatagtatgatttctcattccaattaaaaaaatgaaccaactgtcttgaaaaaattattagaaataaactgaagcctccacccataattagcataagcaaaactgccttttttaaaactagaataatgccttctctgtcattaacagcatttctttctgcaaccatctttgaaatagcaactggtacacctgaagctattgctataaaaaacatatacaagggatatgacatttggtagtaacctattccctcatcacctataagcataataagaggccacctaaaacacatccctaagatttttgcaaatatacctgtaatacctaatattaaggttccttttattaaagtttgctttttcattaataatacctccaaattctctataaatatattaatatttataatttgaaggtattattactttatttattttattgttccatttgctttccaaggaatgatgcagcagtttctgccatttttgtttcaagatctccaaactggactccctcatcacttgaaaaaataattactgcccctactgcatcaccttctgcaagtataggggatatgatttgtgccttgtatttatctaaggaatcatctccatcgtatacaggaatgctcttaccctcctttgacatattaaatgtcttcctttgatccattacagtctctatttcattgctgattctcttatcattatactcttttttagcaccaccacttaccgctattatgccatctctatcacatatgataaccgtgtgaccaatagatgcattaagagattcagcatattcttttgaaaaatcactcaattcatttattggagaatatttttttagaattactcccccttctctatctgtaaatatttctaaaggatccccttctcttattctaagagttctccttatttcttttggtattacaactctccccaagtcatctatacgtctaacaatacctgttgccttcatattattccctcctaagtttatgtaaaatatttttacatttatagtatccaacttatcttgaaattttatgcacatacatttacttatttttcataggataaaattcaaataaaaaaacgagaagataaatctatatttcaccataaaaaagcagaaatactcgctagagagtatttctgctttttattgataaaatgagtttaatcttctcatcttcacaatttatattacctatttgtttgcattacataaggtttttttcatttttgtctatattagcttgactttcccatttctttaatgttttttgatatacgcttttttgtttagtgcttaaaacagtttgtttaatatcatctttaacgctgttaaaatcttttactggatattctgttttctttatacactttattacatgccatccaaattgagtgtgtacaggagcactaacttgattatcatttaattttaaagctgctgccataaaagttttatcatagttactgtcattttcctgaatgtctcctaagtctccacccttttcttttgatccatctgttgagacttgctttgctacagttgcaaaatcctctcctttatcaattcttgcctttacagcttttgcttctttttcagttttaactaatatatgtgctaaatgtactgtattagggctttgtgtatatgaatttttatgagaatcataatacttctttgcctcatcatcagacaccttaacatcttttactacttgctgtatcaatttattagaaatagctctattttttaactgatctttaaattcagctactgtatatccatattgtgataactgacttttaaattcgctttctgtcttaaattcttgctgatattgagcatatacatcatctacatttgttttaatttcatccttagtcaaagttattttctgatcttttgccttctttaagaatattttttgatcaataagacttgtaaggatctgttccttttgtttttttagtgccgcaactgcttcttcatttttttcataactatctccatactgagattttaattgctcaacagtaccttttgctaatttgtcaatttcccccctagttatagtttggtttccatagattgttgcaaccacctttgagtttatagcctcaggtcttttttctaccatgctacatcccacagcagaaaaagtgaacatacccactaaaagtgcagtagctatttgttttgcgcttttcatttttataccccgcttcttatattttgtttttttacaggtatttagtttagatttcaccatgcatcgattctgcaaaccttagaatatgcataattgaaactccttactagaacccgcatattaaattgtaaacttatttgtttaactttttttgtttttccaaataagattataagccatttttaacatttattattttttaacttataactataattttaccataaatttaatttgtttcaactagagatttcatatattttaagaatttttgtaaattttctaacatatcttccctctttacatcttttaaattatacaaaatcactggattatcgcccattttaaacaaaatagacttactgtaattcttaagcagtccatttattaattttttattaactctgtcgttgctctcaaatttaatttcaagctgagtcattttatcctttatttccagaatacctaattgtctacctatacttcttaaataagctatagtcataagattattaactgactgtggtattgaagaaaatctatcttcaagctcttcttttacatccatcatttcttcgtaggaatctattgctgctatcttcttatatattgatattttcaaagtttcatcttcaatatataaacttggtatatacgcatctacttttaaatccacagtggtttcaacaggttcattttgaatttcaccttttatttcctttatagtatcttctaacattctacagtataaatcatatcctatagtagccatatgtccatgttgtgcagatcccattatatttccagcgcctcttatttcgagatctctcattgcaattttgaatccggatcccagttgagtaaactcttttattgctttaagcctcttctctgcaacctctgttaaaattttatctttcttgtaagtaaaataagcatatgccatcctatttgttctaccaactcttcctctaagctggtaaagttgagaaagccccatcttatcagcattataaattataagggtgtttacattttgtatatcaattccagtctctattatagttgtacaaagtaatatatcataatttccttccataaaatcaatcattactttttcaagttctctttcagacatctgcccatgagctattgcaattctagcttccggtataagcttccctaaattagcagccatttcctttattgactccaccttattgtacacaaagaatacttgaccatctcttccaatttccctcattatcgcatctcttattaattgatcattgtattctactacataagtttgtaccggatatctttcttctggaggcgtttcaattacgcttatatctctaactcctgtaagtgacatatgaagagttcttggtataggagttgctgataaagttaaaacatctatattcttcttaaatttcttaagcttttccttatgagaaactccaaatctttgctcctcgtctattataagaagtcccaaatccttaaaagtaatttctttatttaaaattctatgagttcctattattatatcaatgtttccttcttttaaggctttaaaagttgccttctgttgagcttgacttctaaacctacttaccatgtctacctcgacaggaaaatccttaaatcgttttttaaaattattataatgctgttctgcaagtattgttgttggtacaagaaaagccacttgtttcccatccataactgttttaaaggcagctcttatggcgacttctgttttaccgtatccaacgtctccacatataagcctatccatgacttttccactttccatatcattctttatttcatctattgcaagaagttgatcttgtgtttcattatatgggaattcttcttcaaactgcttttgccaaacagtatcctttgaatatttaaaaccattaacagttgtccttactgcatataattttacaagttcctcagctatctcatttatggacttcctaaccttatttttagccttagtccattcactacttccaagcttatttaccttaggtaccttaccttcgcttcctatatacttttgtactaaatcaagttgttctactggtacatacaatttatcatcaactgcatagctaagctctagataatctttcttatgcccttgaacttcaagctgctttatgcctttgaatacaccaataccatgattaacatgtacaatatagtcgccaggtttaagctctgtaaagcttttaatctttcctacaccttttttattttttcttttctctttcttctttttagctgttccaaatatctccttatccgaaattacacatagccttatctccggatacctgaaacctctaagctgacttccaggtgatatgacaacctccccataatctacattaagaatgctgtctttatacacactctcgattcccctatcaccaagcgtctcaacaagcctttgtcccttagattttgttccacataatataaccgttctatacttttcctctttcaattcctttatatcattaatgagcagatccatttgtccctgataacttgaaagagtgatttcttcaaatgctattccagtcctaaagttattattagctgctcttcctatagattctaagtttattcttttttctgtttttaatatttcatatatattttccttagaaactattatattaccttgctttggaaggatatctcctctttcaaggaagttttcataattttgctcaaattcacaatatacactatctatctttcctttacatctttcataattgtctacaaaaatgatagagttcttaagataatcaaaaaaactagatgtattatcataaaaatatggaataaaagtatctatagtttcaaatccagctctttcttttaaggcttcaagattatactccatggtttctttaagcttattatagctttcttcattattgcccttaagtctatcaagcgactgattcaattcatctttaatagcctcatatcctttattcaatgcttcatcagtaagtattatctcttttgctgggaaaacttctatcttatttaccttttctatactcctttgtgattcagtattaaaacttcttattgattctatttcgtcaccaaaaaattcaattctataaggaacatcatctataggagaatatatatccactatacctcccctaatagaaaattgtcccttagcatctacactttcaacatgctcgtatccacattgaaccaactttttttgaagttcttttgcctcaaccgtatcacctaaggtcagtttaaaggtatattctttatataactctacaggcaaataaaccgctgctaagttttcaacagaggttactattattttcttacctctagacatcatttttcttataacctttaatctttcccaccttaaatctccagatacagcatatatattataaaagacaacttcttttgttggaagataatatacgctttgtgtgtaaaataatagatcttcatatatcttcttagcttccgagtcactgtctgtaatcaccaaaaaagggttgtctaattcttcatacaacccacttattaaataactttttcccgattcagaaattccggacaattccataggaaattcattactttttattttataaatagcatcttgaaatttattactacctttcagaggatgcataagcccatcaagtctcattttaacacctcttaaattattataactttaagccgttaaatttattcatagcattttgtacaccatctactaccatacattcaactgcttctgtaactatatttaaaacttcttctatcttctttctttcatcttgactaaattttcccaaaacataattcacaaggttttcagtaggttcacctacccctacctttactctaggaaactcttcagaggataagtgaagcactatgttttttatgccattgtgtcctcctgcacttcctttggttcttattcttatttttccaacatcaagacttatatcatcatatattacaactatattttccttgttaattttataataatttgcagcctctaccacactttctccacttaaattcatgtatgtatacggttttaataaaattactttttcaccatctataattccttttccgtataaacctttaaaaccttttttatctatacttatattgtgcttagctgcaatattttcaatggcatcaaaacccatgttatgccttgtatgctcatattttaaacctggatttccaagtcccactattaaaaacaattgttatcactgctttcttttaattttcaatacttatattatgaagataataaaaaaaactgtcaacaattaatttatattttaaagcttcaacaaacaaagctttaaagtaaaaactaagagtgacaacttgtaattataatcactttgcattaatcatctttactcatattctcggtcaatgttatttgaatcttaactatttttccatttctattaactttgcacggtactttatcgcctatcttactactactaactatactgccaatatcattagtagataatattctttgaccatttaattctaaaattatatcgcttggtcttaatcctgcttttgcagctccacttcctggcactacttccttaacataaacacccttcatattatcttgggaccttaccttaatatctcctcccactataccaacaaagggctttataacctttccattcttcattatctgatctattatatctttaacttgatttatggatatagcaaatcccataccttcagaattatactgtgagccaattttagaactgtttacgcctataacttcacccttttcgttacacaaagctccaccgctatttatttgatttattgatgcatctgtttgcaatactttgtaacttgaaccttgagtatttgcatcatcctgaagctttaaatttctgtttgcggaactcactattccagctgttacagaaccagaagcttcatttccaagagaacttcctattgctatagcaagatcacctgctctaaccttggaagaatccccaaaaatcgcagtaggcaaattgtgactattgacttttattatagctatatcagatgcactatcgaaacctacaagactggcttcaatttcttttccagcttttgcatttgacagtctcacaagtaccttatttgctccatttatcaagtggtaatttgtaactatatatccatctgatttaaatattatacctgaactgatagtttgctcttctccatcagaacctgcatcgtttgaattaattatgccaactatagatggaccaacctcttctgaaactttatttactgaatttgttggaacactgctgttccctataacagattttttttcttgaaacataggagtgttgctcttttctgctagctcatagtatcttgtatttacaacatatgtggcagttattgcaccggataacgcagaaattgttataaaagatataaatttcagcaccttatttaatctaagtttatttctacttctaaaattaatatttccctcattcccatttgaattgttcatattaacttccttccaagatacatcctttatttcatttttatcgttgaacaatcagtgcacccccatacacattatttgttatagtaaagacatttccggcatatatatcacatcttttacccttcagtaaactacacttttcaatgagattgatttctttattattatatagttaattgtttaattaactgtgaataaactgtaataaattcgataaattgcttttatatttatttggccaactttaatgtaaaggtaaattccactccaccttcttttttatttataacatttatatcctgcccgtgctctgtaagtatactccttactataggcagtccgagtcctgtgctcattttagtagttctagctttatcagatttataaaatctatcccatatatgattaaaatcctcttcagggatttgtggcccattattatatattgttatatatgctttattatatctttcttttgtagatatcttaatctcgccttcagcatatacgtatttaacagcattatctatcaaattagtaactacttgacttatcctatccttgtcagctataacatatactttatcgttattaaagcatacatctacatttaattttttttcttttatttttgtttcgaatttaagaacagtaaatcttattatctcatttatatcaattttagttaagttaagcttaaggtgacctgcctctattgaagataaatccaataagtcatttactaatctagtaagtctatttatttcatcataggtaagcgatagataatatctttccttttcttttggaataacaccatcaagcataccaccaataaatccctttattgaagttattggagaacgtatttcatgtgatacatttgatataaattctcttctgtttttttcagatttttcaatagcatttgccataaaattaaaggattcaccgagttcacctatttcatcattggactcaatgtttaccctcttttctacttctcctttagctatttttctagcaacatcatttatattctttaaaggacttattattatcttttgggagaagtagtatataattatgcatgctgcaattattgcaattatcgccgaaaaccaaattatctgataaaccctattaacagaatgctttacctctgatgctggagtagctatcattataactccctcaaaggatttattaaaaatcataggtatctcatataatctaacaggctttttaaatatttcactatagtcaacagttttttctatagcctcttgattcttagctatctcattcaaatctttagtattaacctgcgttccaactaagtaatcatattttgggtttgaaacagcatacacgtagccatacatatccataacaactatgtctgctcctatgtccgtatttatatacgcaactacttcctttaatgtttcattgacccttgccaccgacatattgccttctatatattgaaatgcaacagcctgaacatacttggcttctgtagtgatttgacttcttttttgggaaaaataaaaattttgaaaccaaaacgatagcacagcagaagtcacaacaaaacttattgcaataatgccagtatatgttgctatcatttttgagaaaattccctttctcattatttcacctcaaatttatatccaacaccccaaacagtttgaatatcccatccattaccttcatgaagtttttctctaagccttttaacatgcacatccactgttcttgaatcgcctgggtaatcatatccccatacttcacaaagcaattgttcacgtgtaaagaccttgttcttgttattcgcaagataatagagaagttcgaactccttaggtggcatcttgatatctttttcattatatattactgtatatgaacccatatctattttaagtccattaaaattcaatacttggcttgatacattttcagaattagctcttcttaagactgctttaactcttgctactaattcttttggttcaaatggtttcactatgtaatcatctgctccaagttctaatgttaaaaccttatcaaaagtttctcctttagctgtaagcattataacaggcgtattgtccgcttttcttatccactttaaaacatctataccatcttcttgtggaagcattatatcaagtaaaacaatatcaggtttatactctacaaacacattctgtgcgctttttccatcattggatatttttgtagcatacccactgctttcaagatataattttattacttcacatatattttcatcatcatccactattaaaaccttagctaatgaactatccataatactcctcctaaacattcttcgtataggaaaccagctggtctattaacttataacttcataagttaagaatctttttggttaccattcatagatttaaaataattacttatcttttaatgttacacattttctgcttcaattatctattgagcagtatttatttatagcacccataataataatttaacacattttttcaacttaatcactattgttacaaaatgttaactaatagaaacttattatattgagtataaaataagagtgctcaaaatatttttaatactcttgagcactcttaaaactattcttcttgaaatattttacttacaggcatgtcttcataaattcttcttatagcttcagcaaatatcggagcaactgataaaacctttatcttatcaattctcttatccccctctattggaatagtattcaaaataactacttcctttaatggtgaattttcaagtctttctattgcaggacctgataaaaccccatgtgtgcagcaagctgagacttcttttgctcccatcttaactaatgcttcagctgcatttacaattgaacctgccgtatcaatcatatcatcaactaatatagcttttttacctttaacatcaccaataatactcataacttctgaaacattaggtttaggtcttcttttatcaattatggcaattggtgcatgaagtttctctgcaaactttcttgtccttttaactccacctatatccggtgaaaccactattaaatcatctgtattcgaattttgatttataaagtacttagctaaaatcggtactccttctaaatgatccactggtatatcaaaaaatccttgaatttgtggtgcatgaagatccatagtgagtaccctatctgcacctgctgtatgtattaaatctgccattaactttgctgtaataggttgtcttgcctttgcttttctatcctgccttgcataagcataattaggaattacagctgttattcttcctgcagaagctcttttaaaagcatctaacataattaaaagttccattatactatcattaacaggttcacataaagtttgaattaaaaataaatctgtacctctaactgtctcattgatatcaaccgctgtctctccattgctgaactttcctactcttgaatctccaacttgaacgccaattatatcagctatttcttctgccaaacttggataagagtttcctgtgaatatttttatatttttaccgtggtttatcatttaaccttagtccccctaatttattttagtaatccttttttatcaacccatccttcttttactacttgtttcgcccttgcaatagcaagtgatccctctggaaccttatttgttatagttgaacctgctgctatataagtattatcttccactgttactggtgaaactaaattagtgttgcatcctataaaggatttatttcctataacagttttatgtttatccttgccatcgtaatttactactactgtaccacatccaaagttacagccttcaccaacttcagcatctccgatatatgttagatgagaaacctttgtattatttccaatagtagatttctttatctcaacaaaatctccgatcctaaccttatttcctatattactttctggtcttatatacgcaaaaggaccaactgttgtatcctctccaaccttactttcaagtattacagaactttgaactgtaacgttctttccgattacactgtcctctattcttgaattaggatacaaaacgcagcctgtttttataactgtttttccctgaaggacattgcctggatatattattgtatcactctctatctcaacgtcagcacctatgtaagtgttatcaggatctattaatgtacttccgttttccatatgtttttcatttattcttttttgcataaccttgccaacctgacaaagctgaagtcttgaattaacgcctaaaatttcttcaaaaggaactgatatagcacctattttagcgccctcttcttcaagaattccaataacatcagttaggtagtattcgccttgaacattgttgttatttaatttatctaggctttcaagtaagctttttatatcaaaacaatacattgctgaatttatctctttaaccttaagctcatcctctgtacaatccttatgctctactatcttttttaccgaaccgtctacatttcttattatccttccatatccttcaggattatctataagagctgtaataatagttgccttatatccgcctttttcatgaaaatcaattaaattctttacggtatcctctgttataagaggcgcatctccagtaaaaatagctacaactccatccttgcctctaagaaaatcctcagcacatttaactgcatgtcctgttcccaattgctcactctgtaaagaatagcttatattttttttagatgtggcctctcttactaattctgctcccttacctataaccacattcacatcttgaagttctgattttctcatagtatctattacatggttcaccatttccttatcgcataccttatgaagtacctttggcaaatctgatttcatcctcttgcctttacctgcagctaatatcaaagcacatttatacataattaaatacgttatctaaaataaaacttctagaataacgcctttcaactcccttctgtttgcataactaactatcctaaaagataactacttagctttattttattatattttattaaagatacaatttcaatattctcactatgttttaattcatccctacttaaaacaatgattatttaaattttatacttaacttgaaaaaaatccattaataaacaatatatgtttacgcaaaataaaaaggagctaataaactcctttttactttattcctctgtctctgtttttgtttcttcttcatttttaactttttcatactctgctaatatagcactttgaatcttttctcttgtagctgtatttattggatgagctatatccttaaactcaccatctggtgtctttctactaggcatagcaataaataagccgttttgtccttcaataacttttatatcatgaacgacaaattcattatcaaaagttactgatactatagctttcattttcccttctgatgttattttccttatccttacatctgtaatttgcatacaatacacctccaagatgctcacattttagaataaattatatctactctttatattctttatattttataataatccttctgaaatttaaaaaaattattaaactttttaaatttcgtattattttttaacagattgaaggaacgacgatagctgatccatcatcacctattccattaaaatccaatatagagtaataatcatgaactaacttttctggattttccttattatctacaagaacacctatacctaaaagttcactttcaaattcttttaaaagatcaattattccaagcgctgttcctccagctttcataaaatcatctataaaaacgcacttacttcccttgttcatacattttctagataaagacatactttgaattcttttaagagaacctgtaacataatttatagtaacagtagctccttcagtaaccttagcatctcttcttacaataacaagctgcactccaagaagtcttgcaacctcatacgcaagaggaattcccttggtttcaaccgtcaccacataatctatatccaacgtcataaacttagaggctaatgttaaccctgccatatgtactatttggggattacacattatatctgtcatataaataaaattccctggtattattctatccttttcttgtaaaatcaaacataatttttttacaaatatattaattttttcttcagatattgaaacactgtattttacgccacctgaagcacccgctatagtctcaacttttccatatcctaatttatccataatatctcttactattaccagatcttcgcttattgttgatttcgctgcattaaataaatctgtaaagtaatttaaatttatcactttgtttggacattcaatcaaagttttagttatagccgaaaccctttgatttctgctgaacttttccatcacatcacctattctattattttaaaactgattttttaatttactaataattatattaaaaaatcctattatttttattttattcttatttatatccttaagcaatagtttttaacactttagttctaacttttcaatatgaatcctttataaaatcataatatatagtataatgaagaatgaaagagcgagtatttagttttaatttaccagtgtttaattaagtactgtgcatagaacttatttttgttaggagttgaatttttatgtcttttgatctaaaaaacgatataagtaaaaaaatacactttattggtattggtggagttagtatgagcggtcttgcagaaatactgcttgaaagaggctttaaggtttcaggttcagatatgaacggctctccaatgatagataaattaaaagagcatggcgctgaaatatatttaggtcataatgaaaaaaatattaataatgtagatatagtagtttacacagctgctattccagaagataatccagaattaatttatgcaagaaaaaataatatatccttaatgacaagagctgaatttctaggttcattgatgaaaggacataaatataatattgcaatctccggaactcatggtaagaccactactacctctatggtttcacatatagctttgacagaggatgttgatccaacaatattagttggtggaaatttagatatcataaacggaaatgtacttgctggaaaaagtgattattttataactgaggcttgtgaatataaagcttcatttttagaattttatccttatataggtgttatattaaatatagatgctgatcatcttgattattataaaaatatagatgatatagaaaacactttcgctaaatttgtaaacttaatcccaaaagaaggctacttaatagcaaatgcagacgataaaagagttgctagagttgcttcaaatgcaacatgcaatgtagtatcctttggaattgataacggagatataagagcgaaaaatatatcttttaatgaaagtggttttagttctttcgatgtatataaatcaagtgaacttttattcaacattgagcttaatgttcctggaaagcacaatattttaaatgcactttctgctatagcatcagctttaactcttaaaatcagtcataaatctataatcgatggacttaaaagctttaaaggaactcatagaagatttgaaattaaaggagttaagaatggtattacagtgattgatgactatgctcatcatccaactgaaataaaagcaacactagatgccgcaaaaaactatcctcacaataaaatttactgcgtatttcaacctcatacttattcaagaactttaagtctgtttgatgatttttcaaattctttttcaggtgtagatgaattagttctagctgacatatatgctgcaagagagaaggatactggagttgtaagctctctaaagctttctgaggctataaataaaaatggtgtaaaatcttcaaacctacacagctttgaagatatagtaaattactttaaaagcaaattaaatgacggcgatattcttttaactgttggtgcaggtgatgtctttaaaattggagaaatgtttttaagtaaataatcctcatataaataaaaaattacatgcttgcaataagtaagcatgtaattttttatacttctcaatataattaggcaaatattaattttttcttttccgtttaaaattaatattatagggaaaaatacctgtaaaacaatttaataggaggaagctatcatgtccaattttttgatttcatcagcacttgatatagtattaatctttgctgcttattttatattcagaagtattataagcggtcctacaaggcataaaatatacgagaagtttataagttcttttggtaagtttgtcatatatatatttatagtttccgcagctataactggtattgcagcatatattatgtacagaacaagatttgtatcttatttaaatatagtagctcctgctctagtatctgtttttgttggatttgtaatatcgacagttcctacacgaggagttgaggatgagaataatcaaatgaataaaatctaagattaagaacttatatatttaattttatcaatagtaaaatagttttttattttgctattgattttttatatattatggtatataataatatatgcctacggggtgtggcgcagatgggagcgcgcgtggtttgggaccatgaggtcgcaggttcaatccctgtcaccccgaccattaaaacctggaagggtttttttttatttaaatttatatttgcggggtgtagcgcagtggtagcgcgcatgcttcgggagcatgatgtcgcaagttcaactcttgtcaccccgattatttcaatattttaacttatattcaatttaatacattcagcttgtacatattaactcatcaactcatataatatattgactaaaaaaccataagcttaaatatattagattaggagttgattaacaaatggcattagctcgtatagcaagtcttccaaatacaactttattcaaaaattctggaggtacaggtaatccatatctcccaaacaatgtagctgtacctgtagccgaaccatatagtggttggcctaatataaccaccaatacttctcctacaacaggagatactgaacaacctatatatttatggtatctgcccagtacaaacccttttcttattgcctcaggagaaacggcttacttttatagacgctgcataataaccttccctgcattaacaacagaaaccttaataaatatttctatgaaaatggttgcagataatgcgtttatatcaaacgtttatatcatgccttatataggaactgcacctgagtatgattactcttacaatcagcagttttactgcggaaaattttctcccgcgcaatcattatttgaaacttcaccatataattggcaaacaattaaatctcaatccgtatctatttcaaacatttcccctacaccaattgttcgaaattgggattcaattattattgaactagagactgagataatgaattatattgcctcaccaattggaaatacactaaaccctgctggttttcaatataatatagaatttgataatttaccaacaaattcagttctaactaatgcaacaaacaaaaaccctattaacccacttgaataaatccaaaggggatgtaaaactatttttgatagttttacatccccttattcattatttatgtatataaaacaataatttgtatagtttataaaaggagtgctttattaaagaaacggatttaaatttaatcttcattagattttaataaagctctaatagggtaaggaggttcttattgtgaagatatttgaagcatatactataaagaacatgtgtttaaaaaatagaattgtaatgccacctatgtgcatgtattcttctgataatacaggtaatataaatgattttcatttagtacattatactacacgatctataggcggtgtaggttttataatagtagaagccactggcattacacccaacggtagaataagcgataaagatttaggaatatggagtgaaaaacatgcagaggggttaagctttttagtaaaggaagttaaaaagtatggttcgaaaatagccatacaattaaatcacagtggaagaaaatatgaaggcacttctggtgaacctgttgctccaagcgcattagcctttgatgaaaacagcaaaacgccaaaagagctcactaaaaatgagattaaagaaataattttggcatttaaagctgccgctaaaagagctgaaaaagccggttttgatgctatagaaatacatggagctcatggctacctcataaaccaatttctttctcctctatcaaactttagggacgatgaatacggcggaagcaccgaaaatagaaccagatttctaaaagaagtattggaagctgtaagagaagtatggcctaaagaaaaacctatacttttgagagtttctgctgaagactatagaggcggctctggaataactccaaatgagatggttaacattataaatatagtaaaagatctaatagatgttgttgatgtaagctctggtggagttgctcctgcacacataaacttatatccaggttatcaagtaaaattgtctgaagttataaagaatgagtgcaacgtaccaactatagctgtaggacttatatgtgatataaatatggtagaggaaattctttcaaataaccgtgctgatcttgtagctcttggaagagaacttttaagaaatccttacttcgtattaagttcagcaagacttaagaatataaatatagattttccaaagccttatgaaagagctttcaattagacatttatataataagtcaaagctagggttatgtttattatttttatacaatcctggctttttgttttttcatgcttttcttaaatgtacaacttttcttctgtataaatcctgtaaaatttggttagcatatattgtatatcatgattttaagggggtttttatatgaataacaagtatatagaacttttcaaatcactcgtagattcctattacaacgatacttttgattcttttgtatatcacatcctttcagatgaagaggtagataaaaaagagctctcaaaagtaatatcatccttatgtggcgttagtgttgaatttaaagatactgaaacttacataagtgaattaaaaaaagcaatctcaaattataaatgtactgataacatagtagaaaaaatcaaagaatgcgattcttcttgtcacagcaacgaaggagaaactccctgccaaaaatcatgtccatttgatgctatactggtagataaaaacactaagacttcacacatacagaaagatttatgcacagattgcggcaactgtataacttcatgtccttctggatcaatattggataaaattgaatttatgcctctattaaatctatttaaaaataatgagacagtaatagctgctgtagcacctgccatagctggtcagtttggagaaaatgtttcacttgaaatgcttagaactgcttttaaaaaggttggatttgcagatatggtagaagtggctttttttgcagatatgcttactataaaggaagcttttgaatttaatgaactagtaaattcaaaggatgatttaatgataacctcttgttgttgcccaatgtgggtttccatgatacgaaaaatatacaaggatttagctagacacgtttcaccttcggtctctcctatgattgcctctggaagagttataaaaaaactaaatccaaattgcaaggtggtttttataggtccttgtattgctaaaaaagccgaatctagaagtcaagatataagtgatgcaatagatttcgtgcttaccttcgaagagttaaaaggtatatttgatgtactagatatagatccagaaaagctgccagaaacacatacaaagagttatgcctcaagagagggcagactttatggtcgcacaggtggagtatctacctctgtagatgaagctgtaaaaagaattttccctaacaaacatcatttatttaaatccacaaaagtagatggtgttaaggattgtaaggatatacttaataaaacgcaggctggtaatataggtgcaaattttttagaaggtatgggctgtgttggtggctgcgttggtggtccaaaagctatagttcacaaagatcagggacgtgaaagtgtaaataaaacagcagaaagttctgaaattaaaatatctgttgatagtgaacgaatgaaggatattttaagtcgaataggaattaactcaatagaagatttcggagataaatctaaagtagatatttttgaaagaagattttaatataaatttatcagtcgataaggcttagttttcatgttatacttaatatataacgtaatggaaactcagtttaacctatacttagatttgaaacttttaaatgtattaactaggttttactttcaatttcctataattgtgaggtgattgcatatgactggtaaaattaaagcagccattttcgacatggatggtacacttgtagattctatgtggatttggcaatcaatcgatgtggagtatttaaagaaaaaaaatatatcatttcctgatgatttaaaagctgcaattgaacacttaggttttcatgctacagctagatattttaaagaaagatttaaccttaaggaatcaattgaagagataactgatgattggactcagatggcatacaaacattatgcagatgatataaaattaaagccttatgctaaggaatatttactatatttaaaaaataaaaacataaagttaggtttagcaacaagtaattgtaatcttttagttgaagcagcactaaagcctctaggaatatatgatttatttgactcaattacaactaccgatgaagttgataaagataaaaactttccagatgtttacctacttgccgctaagagattaggcgtatcaccccatgaatgcatagtttttgaagatattttgcctgctatattgtcagccaaaaaagctggaatgaccgttgtcgctgtacatgatgaatcttccattaaaagcttagttgatataaaggataaagcagataaattcattgtatcttatgatgaaatcattgcgtaattcttcaatacaaattagagaaccaataaaattaacattggttctctaaaagttattttttacttgtaaatattctatttaggttcaataatatcttcttctaaaatcaaatctgaactaggtatccatcccttattattagtatcaatattcaaattgatcattacctcgtaccataaattattctcaatctgtccactatcaattatttttatattggttccgctttgtacattcgttaatatataagaatcatatacaggtgcaatataaagcttagtatttttactaaccactccatttttactcttaacaggtatatactttataacaacagaattattaaacctttcttcttttttatctgaataaccttttaaagcttttttcattttattattttgtcttgttaaaaccattatgtgtcttttttgttcttcctctttttttataagatcaactgcaaaatatatacaaacgccaaaaaatatgagcactacaagtataatcaaaggcaatacctctcaaaacatctattcactatataatatgtactagtatctataattatttactgcttataaaatttctccattagtgtactgaggtactaattttacaatatcctttttacaacaatattcaaagtctttttttaatcctagttccattattctcttataatgttttgcatattttacaaatccttttatatcctcattagttttataaacatattgagccgtggttgctgcatctgtaagctctagctttttcattctatccattacacaatttattatatatccgctacaaataaaatcatcaattgaaaattctccataggttcctgcattaactattaccacatcattattaagctctactattttttctgctactgcttctccattaagaacagaccctataagtatatcccttgctgtttctgatccctttatggccctggttccatttgttgttgtcataattaaagttttaccttttacaacatcttcggtatattccataggagaattagaaaaatcaaagccctctattttaaggccttttctctctcctcctaaaatagcatctttaccgtattcttttaccttttttaaagcctcttcaactgtaagtactggtaccactcttttgcagccattgtttaaagcagttgtaataacagaggttgccctaagcatatctattacaacagcagttttattttttaccttttcttcttttatatcatcagcagatataatcaaatctattttcaagctacccactccttataatctttataaaaatattttaccattatctaaatattttaataaataatttaacaaaaaattctccataaagatgaaatttttctttgtaatcatctttatggagattcataattaattatttgacattttcaacacttgctagctggtaagctcctactgcatcattatatttaaaggtatatttatagttaaattcctttttagatgtaacataagtctcaccattatcactatctatgtcatacacttcatgtgtaactaccgtacctgatttactatcactactaaaatcacatgaaacaatattacactgctgattcatctctactatttttttactataagcatcttttatatatgcctcttgctgtttataaaggtcgctatctgggtagagatacttttgtataagcgacatattattgtcatttacagcttctccaaagtaaagagtataatcctgaagcaactgtttaatcttccactcattagaatccggtttatattttgaattaaagaaatctaagtatacttgtggcccatttatatcataagaatactctaacttttgaatatcactttttattatttttccatcttttttaatagttccgtatatacttgttttcttatcaacaggtccaatagttttaatatcttttatcttttttcctgtgtccttatcacctataaatatttctgcatctttttcatcactgtcaattttaacgtattttaaatccttaagcagtacaattgaaattttattatttttagtttttagcgtattaacatttttagaatcagttgggcttgcatatttgcccttatacactgcttttatggtatatttacctggcagaaaaggcccgtattgtttattatcattatcttttgttacggtaccaatcttttcgttgttcaagtaaatatttgttcccttaaattttgtcttaactgttacataggctggctttactattattttataattaggaaaaaataaatacttatttccttcacgttccatcctaaaggcatatgaatttgatgtaagtgaagggctgtctgcatttatcgtatctgcttcatcatttaattcacttaagacactatctgaatatgacttattgctattaaaatatttaataagtatatttgcacttgcatcatccattttggcattattatttgaatactctactaatttttctatcttagctttatctttctttgctactgcttcttcaaaattttttactactttcgatggattggattgagttttcccaaaataaataaatactccaacaaaaatcactactacagctaccgaagctattgctataatcattttttttgatatactcttccttacaggtgatattgtctcaaccttgctttcttcagctttgattttatttaaagctgaagcttgactttttttatctgtgacactacttccacatttgggacagaccttgtattcgtcttctaacttatgaccacatttagtgcaaaatctcataactatatttcctccaataatatattataaaaactacctacttacactttctaacagtttatatactagatatgtatttgttttaccattaaatttaaaactatatgaacaattatattcttttgttgactgtacgccatacttatccacattataaacctcctctgtatttacaacaccactcttaccatcctgattgaacttacatccagtaatattacagcttttagttgttatcttttcatctttactttgatacttttttactaaagcctttacttcatcagaaagttcacttcctggatatatataagaattcatagcacccaagttaccagtatttacagcaacacatttgaagactaaatagtttttgataagctgttgtacttgtcccccattaggatttggtactcctgggtatgtaggaaaatctaaataaagcttaggagtctcctctttattatactcaccgcctatctccttttcttcactcttatactgcttaccatttataactgcaacagcatatatctttgtattattagtgataggtcctaaagttttaacgtctttaatttttttgcctatatttttattatctataaaaacttctgcatcctcattttcactagtaacattaacatatttcacagaatcaatattctttacttcggtgtttttcgttgtatcaaccttaacaactttatctaccttagcataatttcctctgtaagattcctttaccgtataaattccaggcatgtacggtccatatgtgtgtgtaaaatcatcacttgtacttgttccaacttgtttattattaatataaatattagtacccttaactttgcttttaattgttatatacgctggttttactaatattttataatcaggaaatatcccatacttcttttctgctggttttaaattcataaagtatttcgagcttaaatgtgcatctgaatcacttgctaatttatctgcctgactacttaactctttaaataatccttttgaataatcatgatgatttttaagatactgtataagaatctctatatcatcttcattaatgtgttgtgacttatttgaagattttattaaatttttcacttcacttctatcatctctactgattgctgttttgagtgattctactgctgtagctgggttagattgcatttttgaaaataagctgtgtagaataattaatattaaacctattataagtcccgttattactagtttacttttttttgagaagtttagtttcctttgatttaagatattatttaaaagcctattgccttgggaattgaaattagtactttctttttgcatagaatcctcttccttatcctttccactcatataatcacctcagttctacaattaaagcaaaaatttttattatcttctaattcattactacaattagcacagagtttcatacttaccttccttccagagcaccaattattatctaaagtgccaatatatatcgttaaacttgcgatattattaattatcttctacattttactatatttttttaatgtagtaaaataaactaatgtaattttaggaatattgttccttgagttaccataaaaaagactttacatttgaattttccattacaaatgtaaagccttttttatttattttccttccatattaaaaatgaaattacaaacacagcagcctctttaaagttttttatatcaaaacccgtttctttctttaatttatcaatcctatatataagcgtgttcctgtgaataaatagtcttttagcagtattgcttatattaagtccatttttaacaaattcatcaattgtatttagcatttctgagtcaagctcatcgaatttatccttaaacttatacattatttttttctttaaattattgtccatataataggccattctctctagaaaaagtttattataatcaataacctcttccttaagggaaaaccttctaaataaaactaatgcctctattgcattatcataagcctgcttcaaattaaaattatcttttgaaatttcgctaaaacttacaacacacttgcaaaataagtttgatataattgcctctctcatactaacagcatggtcatatacatcttcaaagtctccaataattataatatctgatttatataccatagttataatatcactactagtgtacatttgatttactatattaagtccatcatatacatttgagtttaaccttacaataaaaagcactgggctaccaacaaacatattattcagtattttattctgctctaggtcttcttcttcaagaagcttttgaatatttttgtatctccttgaacatatctcattgtatttattttctattgaatacataagtaatttcacacatgccttaaagcttttatctaaccttaaaacaaatctatcataacctaagttcaatggatagtacacattgctatggctctcaacataagaattgcttttatatattaagctcccatcctcggttgatatttcaaattctataccagacctattttccagttcattaagaaatgtatttaactctttcatattcacctcttaattataatatagtttcttccgtttctttatcaaacacatgaagtttgttaatatttattccaattttaatttcgtctcctgcttttgaagtagatgcaccattaaccctcactataaaattagccttgccctttgcaagatgtatatatgtttcagcacccataagttcagtaacctctacttttgcattgattattgcgtccttatgcttttgaagaaattcaggactttcatccatattttcaggccttatacctaaaataacttctttattaatataaccattttctttaagtattttactgatatcacctgaaacaggaatttcttgtccttcaactgataccataatttttccgctatcttcagtcaccttagaatcaacaaaattcatttgaggacttccaataaaacctgcaacaaacatattctttggcttttcatatatattttgtggagtatcaacctgctgaataactccatccttcataactactattctagttcctaaagtcatagcctctgtctgatcatgagtaacatatataaatgtattttgtagatccttgtgaagcttggctatttcagttctcatttgaactctaagttttgcatccaaatttgatagaggttcatccataagaaataccttaggttcccttactatcgctcttcccatagcaactctctgtctttgtcctcctgatagtgccttcggttttctatcgagaaggtgtgctatatctaaaatctctgctgcttttttaactttctcatctataacatctttgggtgtttttcttagttttagcccaaaagccatattttcataaacagtcatgtgaggatataaagcatagttttggaacaccatagcaatatctctatcctttggggaaacatcattaactactcttccacctattgttagttctcccttagttatctcttcaagtcctgctatcatcctaagcgtagttgacttaccacaaccggaaggtcctacaaatacaataaattccttatccgcaacgtcaagattgaaatccttaaccgcagtaacattaccatcataaactttataaatgtgctttaaagataaatctgccatactaactccccctagttttgtattatacttacattgtagtttataaagatatgtttatccatgcatgaatttcacaaatttatatccacttatttgtagaaaaatacaaaccttgatatagattatttttcctcatactattatctatagaattaagaacttcccacttcttaagactccatttaggttcaataagtaagtccctaggtgcatcacctgtaagcctatgtattacaatattttgaggaagcatagttatagctctgcaaacagtttctacatactcctcctcactcatgaaagttaattgtccattattataaagttccactaatggagttcccctcattaagtgaagtaagtgtatctttatcccttgaacctctttatgcgctacataatctatggttgaaagcatatcctttggtttttctcctggcaatccaaatatagtatgaaccaccacatctatttttctctctcgaagtttttttacagcatcatcaaatacgatagtatcatatcctctatttattactttcgctactttatcattagctgtctgaagcccaagttccacccaaacataaattcttttgctaaattcctgtattaaatctaaaacctcttcactcaaacaatctggcctagttgcaattgcaaggccaacaactccatccttacttattgcctcactatatttttctctaagcaccttaattggggcataggtatttgtgtatgcctgaaaataggctatgtacttaccattcttccacttgtttttcatcatatcctttatatcctcaaattgcgttgatatggaaaactttctattacccgcaaaatctccagatcccctttcactgcaaaacatgcagccacctctacttatagtgccatctctattagggcaagaaaatcctgcatctaaagatatcttaaataccttatcctgaaatttttctcttaaaaaataatttaaactgtaatagggcttatctccccatcttttctttacttgttcatttttatcttccttcacctttatcacacctcaccctttatttcttcagctttaccttatatgtacctatattagtattgtttcactataatttacttttgctcatcttttctactaaaccctttaaacattttaaaagattatttatgtcctcttctttcataccatgtaaaaaatcaaataaaaatgttccactggattccttgtccatatcttctataagcttttttccgctctctgtcaaaaaaactctgcttattcttctatcatttttatctcttattttttctacaagtcctttattctcaagtctagttattctttcggaaactgtgtttggagagttatttatattctttgctatctcaccaacagtaggtgctatatcaactataagctcatttatttctataagaagctgaaattgctccaggcttaaatcatattttttagataacttataatatttttcacgtattaataaatctatttgttttctgcattttataatatcttcaattttttgtttcttattcatattttcctccaaaataaatcgtgtaacgatattttcgttacacgatttattttatagtctattatattttccgtcaactttttcctttagccttacttaccttataagtttttaaattcactctccactgtcctgccttatccttagatttaggttcattagcatttctaggcttactatcaaaaattaaatatttctcatcaaactttacaagtgttaaatcgaacttatcagctggaaactttttatctacttgtttggataccaaatctcctgattgagcttcatacatttttattctcatactattgttttcaagacattgaacggcaataattccatcatcattagaataagctatatctttaacctgagcatttttgtatacatctataactttaattgattttgcagctacttgaaaaggctgactctcatcacttaagctttgatcactttgactttgggaagcattttggccatttccaccatttccaccaccttgctgctcaagatcttgtatttcacatacaccaataagcgggttagctccagctgtagatataatagccatatttccatcattagaagcacttaaaaaactgaatccatcctttgataccttaattttgtctatttttaatggatcacctttagaaaaatagtattctggcactcccactaaatttattaatatattgctttttgcctcatctttaattttaaccatcaaatttcttttatattgaaatacttctttatcactagtactagatattttttctatcaaatatttacccttgctcttttttatcttaaaaatatccgtatcaatacttgtgtagggtgaattttgatctgatctaatcacattaactcttatatttgcagttgttcccatttctgtagtatccattattttataagaggttattttaagagcagattgctgcgaaccgctagcttcctttttaagacttttaccgtatagctgctgcatttttgaaaaatcattattcgtgtatgctgtcatatacttattaacagttgctattgccttgttcatctgaaattcatttatgttggttaatttctcattttttgtacaactagtactggtaaatacaattaataaaatacaaatataactgaagaatcttttcataaataattcccccaatatgtcatttcctcattatagtttgctcaattttctcaaacatagtcattgttttttgataaaaagtactataataaaaaatttttaattatatatataataataagctaactcataaaataacttaggttacttaatgatatgggggatttttatgataaaaaattttaaaacgatattaattattgcaaatgtatttataggcaccatagttggtgcgggtttagcttcaggacaggaaatatttcagtttttcgcttcttatggctacaacagttttttcggcttagccttatgcactgtaatatacataatggttggatttgtaatattaacactaggcaagaaattcaatcttcattcctataacgacataatatccgtcgtaagtcctgggatacttggaaagataataaatcttctcacaagtttctttatggtaatgagctgctccataatactcgctggtagtggttctcttcttaatgaatactttaacattccaaaatgggttggaattatatttatgctgattatatcaatagtaataactttaaagaatacagaaggcttaattaaggtcaattcttttatagtaccactattgataacggtaatagtaactatcttttgtttgtatttttttacttcaaagggctttttgtacaaccctcttcctttaaaaaagggttcttggctattatcaagtttattatatggaggttttaacatactatgctgttctggtgttcttgttcctcttagctctgagagagattttagtcttaaaaatctctttttaggtgtttgcctaggatcaataatactaacagcaatctcctctatgataaattatttactgattgcaaatattccatatatatttaaatatgaaataccacttctttatgtagctagcagttttagcaagataattcagctactactgcttgtaataatttggtgtgaaatgctatctacagaggtatctgatatctacagtatagctaaaactctagaaagtttatttaatttttcttatataaaatctacagctataattctagtaattgttttgcctgtatctcaaataggttttaaaaatttaataacagtcttatacccagccttcggatgtataggtataatatttatggtacaatgtatttatttctatataaaacattagagggaagtgtttttataaatggattcactaaagaattgtacgctgtgcgctagaaaatgcggcgttaatagattagaaaataaaaaaggtttttgtttatcaagtgacaaggttaaaattgcaagagtttctcttcacgcctgggaagagccttgcatatccggtaaaaatggttctggtacggtgttcttttctaactgtacactaagatgtgtgttttgccaaaatcatgagattagctctgagggaacaggaaaagaagtttcaatagaacgcttaagtgatattttcttagaacagcaaaatcgaggtgcacacaacattaatctcgtaacgccaactcattatgtacctcagataatagaggctataaaaatggctaaatcaaaaggacttactctacctattttatataattcaaatggttatgttaatagagaaactataaagcttcttgatggatacatagatgtatatctgccggatttgaaatattttaatgataaatacgccattaaatactcaaaggctccaaactactttaatgtagcctctaacgctatacaagaaatgtttaatcaagtaggcacgcctgtatttgatgaaaatggtttaataaaaaaaggagttataataagacatctaatgctgccgggactattatttgattctaaaaaggtaatggattttatatacaatacttttggaaattcagtttatgttagcattatgaatcagtacactcctacctttaaagctgaaaattacccagaaattaataaacctttacacccaaaacattatgatgcccttatagattattgcctgtctataggcatagaaaatggctttatacaggatactggaacaaattccgaaagctttatacctgaatttgatttgagaaattgctaaaaaaacaggagaaggtttaatctaacttctcctgtttttttatatacttttcacagctttaagttcaaatatcatataactcactgaaatgccctaaattttatatctcttcaaatcatttctgaagttctctgctatctctttaaattcccctatcttatttgttaattttgctatttctgctgcgtaagttgttacactagcacttacttcttctgatgaagcggaattttcttctgctattgatgcaagtgtctccatcttatcgtaaatttgagatattgactcagcttctttatttaactctgtaactgtacttatcatcgcgttggatacttctttagctgatacatttgcgtccttgctcaattctcttacatttttaagcgttgatatttcaccttcgagcactccatattgtgtttcaattctgctaacaagctcatttatatttactacaaactgttcaaggttactattaatgttttgcactgctcctttagtctgctctgccagttctcttacttcttctgctaccactgagaaacctcgtcctgcttctcccgcacgagctgcctctattgacgcatttaaagctagtaaattagtttgatcagatatttcagaaactattgaaactatactcgttatatccttagccttatttgaaagttcttgtcccttatccttaactattttaaattcatcaatacttcttgtgatgtttttacttgtagcatcaacactttcatagctcttgtctatctttcctatagtcttttctagttgaaccttgttttgattctcaacatctaccactctttttaatccatttatattgtcattgagtacagctacgcttgtttgagtgttatcagcttgacttacagcaccatctgcaacctgctcaactacctctgatatctctcttgaagtactatccatagcttttgttatagtatttatactttcaacaaatgtgttcatttcatcagtaagtcctttaaagcctacaaaatccttagtcatttccttactatattccttaagttctgaatatatatcctcccaaaaatcggaggtttctatatctccatcaactgaaaactcgtgctgccttaaattatttatctcttcttttatgatccttaaaggtcccattaaaaatgttgatactataagtgctgctaaagcttctattactgaacacaccaatgctttcacaacattatctaatcctaatataggtaaaaaagttattattccaattacaagcgtaaacattgatatcttaacaggaatgctttttataaatccaagtgataataatttgtttattttaaaggatttcttataatatatgtccttatcgaaggtaaatttaagaacaacactttcttttgttttttctacctcttcaatttcaattttctcattaaaatgattagcactaccttttataagtccttttaagtaatcaaacattcctcttttagacctatatgtaaagattgcttctctcttagatattggttttatcaatataagaggtggcttagctcctggaaactttttagtcataaccacgtgcacatcaaacatagatttaaaaaaggaatataaattttcatgttcaaagaaagcgggaaaatctttgtgaaaggcaattacattatcctcacctatcttttcccatattatgcttttctcctcattaaccttctttgatatatcttcaataaaattatttactttgctatcttcaacatcttcaaatggagaaaatatcttttttctttcaaagccaactttttcaagtgcattttctactacagtttcaccatataatcttttgcaggtttttacccatgttcctactactgttcccttcatcttctcattctcccttcatagaaaacttaagtttctatgataatattatacagcatgcaatggtttttgttaagtattcttttgtaagaaataatgattattatttacagctgtggataatctatataaggaacaggtctatctgggtatgctattggtggataaaagattccttcctcttcaaagtcttctcctctaagttctgctattttagttactgcaacatatatatccgagattctataccatgtaccataatctacaacacctgtaactggaatattaaatatcctttgaaatgcttgaactgagtttctagtttcagtgccaaaggtacttgtaacagcaaccttaggaatagcagagtaattatttgagattctattcaaataagtctgtatagttctaacaggaattcccgtagatccaactcttaacgcataacctggataagacataggtataccttgcaccttttgagctgtagcaaattgaacttcggaaccataaaaacttcttattatttgtggagcagtctttccttgatcacctaaatacttacttccccactgtgtaagccatccaggacattgtacattctttccatcacaaaattgtgttaatagtggttgtttccttcctggaagcttaatataagttgtaaatatatcatctactatattacttatatttttatatatatttcttccaaaactgaaggcctgatcaaaggctgttgagtttgttattgtaaaatcctttcccttacccctgtaccattcagtgtaaactctattcaacacaaaggatattatacataaagcattagctcttattgtactatctgaccaggttgaaaatatctcagaggaacatacattttttatataatctataaaccttacagtataatttggtgcagatgaatctggtggacctgcatgcacaacaatatattgaggtacttctggttctggaagtacaacaaagccacttggtcccgatggtgctggtttttctggagcctctggtatttttggtggatattttcccacttgtacattaggttgtatttcaattattatttgttgtctttgggctgtaccagtcaaattagcattttgaagtgctactctgtctggcataacctgacacccttttatcagctgtgaatttaaatttgcagcatcaattcttatgtcataaagtccatatggaatttgatccgttggacgcatcgaatattctattggtggtgtatctaattcaatttcttgtgtaagtcctgagctgtctgtattaagctctatattctttgttgaggttccagtagtaggtgttattgtaacctttgacttacttactggtgtataattatctcctcgaaatacttgaacttgcaatctacccttagccataataatccatccttataaaaactattcattatatttaatattcatctactatacttttattactactttataaaaaactttctgatttctttaggtattcttacaaacacccctcttcttttactcctcatcctttcaaaaactccacttaaatctaacaagccataaccagtttcacgatttgggtaaacttccccttctcttctatttgcgcctcttattaaataagtctttatttttgttgaatataatgttctatcatttccatcaactattccccactgaagcattaaaataactgctcctgcaagtaccgctgcagcaggactacttcctgtaagcgttactggctgaccatcaccatcaactgttggcaccatgtatccaccagccgcaattattggtgatatcctattatctctcgtatatcctcttcctgaagaagacattaaggtattattatcctgattataataactacaggctattacgctctgactggttgacggtaccgttaaggttatatactgagatggatttagaaattctgttccttcctctaaaagcaccttctgaggaagccatgcattatattgaccattctgtacatactcacctgttagatttaatttccatattcccggctttatatcttgtatatatactcttataagctcatctcccgttaaagcttctggaaaatggtattctactgtaactgtactcccttcatacacaagcctagttacacttggtcctttatacttaggtggaatcttttccacaatctcacctgatggtgaagttatacttattgaaaccctatcaggactgttaatccatatattaatgggaagattcttttggttttgccctgatttaacctcgataacatttacatcattagtatttcttagagttcctgaggtatgagtgttcgtatccccttcatttccagctccacataccactgcaactcctcttactcttgaaatttgatctatatatctctctataagagtattaccgtcatgtcctccttcattagttccaagtggtatataaataacaataggcatatttaccttatgagcataatcatataaatactttatgccctgaattatagagctactagcatatacaggacatttaggatttgaaactccatttctctcaagagtaactcttttgggtggaataagcttaactacagcaaagctacaatctggagctgccccaacatatttgcctcttccccctattattccagcaagctttgtgccatgactgttttcatctttaaaattcaccttactataaggatctccgttatttttcttaagtgcaattgccgcatttatatccgcagcggagtattctcttccatagtttacattagtattgttagtgtcatttgttgccgtttgatcccacacagtcataatcctagttgtattatcctcatacataaattcactactcatatagtccattcctgtatctataattcctgcaataacaccttttcctgtaagtgttaggtaaggattatcatgaaatttatttatatttgcagtatccaaaggagataaagcacacaagctgtacaaagctggaatctcataatataaaatttcgggaatagcccttaaaagttcatctattctgttttcctgcacacttacaacataataattatcgcctattggaaatgcacaggcataatcaatctttgacattttttgcataatatcactatctgcttctaccgtaatatttaaataatctggtcttaaatacacatttgcacatgtctttattgtttgccttaattctttttctccacgagttacagctagattaagtgcattactaatgcatactgcaccatagccaaaagatgggtttggatacgtaatgtcctccctatctttctttgctccattaagtaaatagtactttaatctgtctccatataaatatatatcttttttaagaactataccccattgcattaaaagagcacaaattcctgatacagtaggagacgccatagaagttcctgaaagagcatcatagcctcctccaggagttgaagattctatattttctcctggtgctataacatcaggttttataggatttcctgtttctcttcctcttccagaaaagcttgatattgcaccagttaaataattataactcccaactgttacagcatctcttacagttcctggtattcctaaagtatcatatacattaggtcttaaaaatcttgtttttggatttagtccttccgttacaggcatccaaatatcataattcccaacggttttagatcttttagttattgttatcatccatgtacctgtagtgagtatctcattatctgataccaaatttattaaaatttctccattcaaactaaaaggtttagggccactgtaatatataaaatatctgtcattttgtatacgcccttcgttgtaaccttcttttatgttaattactcctgtggatacatttgctggatttttaacttccacagctatgtcctgtgtaaaacttttataaagctgaagaattatacttctctctccttcggctatattcatagatatagtttgactttccctaagtacccctcctacatgatgtcccatatctccttcatttcctgccgaaatcacaaaacttattttctcaagtaaacatatattttctatatattgttcaagaagacttgttccgtcgtgggcaccatcattagtgctaaaacttaaatttattacaagcggcatattcatagagtttgctctatccactagaaattttactccacgcataagctgtgtactttttccataggctgtcttaccctctccagtcattttcaccatagctatattactttcataagcaggtccaaaatatcttctatctatatttcctccaccgcaagctattcccgctacatgtgttccatgtcctaattgatctctttctggaactattgaagctggattatttgatttaatagccctatttatatcattattattccaaacctttccgcccatgcttaaatcgtatatatataagattctactcgtaccatccttattcataaatgtaggatgcgtataatctattcctgaatctataaatccaacaagcactcctttacctgtaaggttataaacattccaagcactttctacgcaactagccgtatttgcaggcataaaatcagcatatagatttttaggcagctctacatactcaatttgagttatctcatttagtctattaagattacttataggaatagttacaattccaaaaccaaagcctaaatcctcaaagcttcctcctaaattatccacagaactttttaaattggccggattatccacaaatttaataacaacctcaatgttttgggcaccattaatgttcttaagtgttaataacttattttttacgttttccggaacattataaaataagtctagaaatgcatcattcttactcgtaaaaatacccccaaaaaagtatatctataaagtatatgcctattaacataaaaaggtgccgaaaagcttataatcttttcggctttttaaatcatttaaacactcttatagaattcacaacctgtggcaattctgaatgcattttcatgaaatctttaaaattaggatcagtttctgcaatggttaaaccagtaggtcctccaacaaagtattcattgcctccaacattaatcacattttttccatctatagtatcccaacactgactcttgaaatctggagaatttctacagatgattaaaagtaatcctgagcccttttgtcccttaaaattaatatctaatcgattgaaactctctgatacagaatactttccactccaatcctgtggaaatgtaataactatacctaaagctttactaacataaaaatttgatttgtcataagcatcattcttctttactgttgtaatattcattttagtaatttcatgtgctacttgtaacgattgtgcttgtgatacattaaaactattatccttgtataaatccattttcataaatcctacagctgcaactaaaactattaatattactgaacctatgctatacataaatcttctgttcttaaaattaccattcataattattctccttttatacaacttttatcatagaatttattcttacacctttaatattttcatattttaaaatttttataggtattatgaaaataaaaatgggcattagctatttttattagctaatgcccattttttgttatatacagaattctactttatttattcttcctattattttaatttcatttgtttgaaccgtctgtgtcatcaagtttccattgttacttataagaagcagtttattattatctaatctttttatttgtcttaaaactctaaggtcattgtattcaataagacaaatagcattattttctatttccgaggtcatatgaccaaaagctacatcgtccttcattattctaaatcccgtcatgtcattattctctatctttataaagaaaaccttatcttgattaaagccttcaatcttgttagcaattacaggaagtgaccttttatcaataacctttttaaaggagtagtcgtatacaggaacactctttaaaatagaacttaaagcatctgtccaaacctcatttgtttcctttttcttcgcttgacttttaaattgatagttagtctctctaacctcttcctcttcatctgctgacatatttatatcatttatatcttttccgtatagctttttaattctatgtatgagactttctgttacaaccttccttccacattcaatctcatttataaacttctcagctactccaagcttcttagcaaattgcttctgtgaaagctttgcatcctctcttattttttttactttttctcctgctctattcataaataataccatccctttaattttagataagtgacagatataaacctttgttttatctgccacttttcaatttcatttgttataattaagcatttttatatccatttttaatataccactcacgctctttatttaactcatctaataggctctttaaagtccaattcatagatgtaggcgttactgtagcaaatattggtgaactcttgcttatagttcttatagcttttatagctgtttctatttccttatccacaaatttgttaaataaaacaagcctgcaatctggtaattcttcatcatatgttaaaacattgactccttttatcagatctcttattttcattttgctcatattcttatctatcttagagaatcctggaagcttgttttctgttactatcttttttaatccttctatttcttcttcatcaaaaccatatataaacattctgccattgcttttcattttattaccttccttacataagtctttactttttaagatatcaatctataggttcttttttaaatttcatatctatttccagagaaagcacatcttcattaaattttatgattatacaccctccaggtaaaattataaaggcatcttctcctaaaacattaaaaattccatctttaccgctgacggtttcctttatttgaaggaatgcatccatatcactttgagatgcgtagtctaaattaaaaatactttctctattgctgcaaactctgcaggtatcatcccctacaaagatatctactgattttattttatcatataaattaagcttaataccataaataatatatatattaccactattgccatgattagcaatagttatacaattggcaggcttgttccatgaatattttacatgtctacgtaaaagctctccctgaattatcttagaatcattttcatctatctttttcaaagtaaaaactttcacttcatcaccttatttcactagtttttagatacgtactcctttagtaagtccactattaatttattcataagaatacattatgtgaaataaaatgaagcattaaatatggtacttttataaatctaagagtctatggcttagatctagtattttatcatcttttaaagaattcattattttaatttttcctttttcactgccaatatttaaaatatcatatttatcaagttttctttttagctgcataactgttccttgactaccatcaattattggaacatcccttgcaatacttgcaatttccttctttacaaaaggataatgtgtacatccaagtacaaaagctgcaatatcatctttttcataatccttaaacttatttcttaagtactcctgcatcttttccccttcaactattccatcttctataagttctaccaatccaggacaaggaagcttaactatttctgaatccttctcatatttctccataagatttttgaacttaacttctgaaagggtcataggcgtagccattattattattttaccccttctttttaattctactgcgggttttagtgcaggttctataccaattacgggtatgttcttatatttctctctaagttcatctattgctgcgctagtggctgtattacatgctacgacaagcgcttttatatttaatttaagaagtttctcaacaacattgaaggttaggtttcttacctcgtccacactttttattccatatggtgcattctttgaatctccataatatataaaattttcgtatggcaattgttttactgcctcttttaaaacacttatacctccaacaccagaatcaataacacctatagggttatttttcacactcacaatatcacctctgaagcatatctattaaaatttagcataatctagttataggtaaccaatgtttaatagcctacctaatttatctatattacatctatatattataatatcataaatacatataatttctatagcaaagcactttcaacttcacagataataatatttaatgtatagtattttattttattgctttttattctataatatacatatatttaaatatatggaggatgctatgttgtatttagaacaatccgtgtttaaaataatacttttaagcaaaaataaacaaattcacgattttttgtctgaaattatacattcagctaagtttgaaaatgcatcaataaacatactgcatgcttattcagtagaagaatgtaagacaattgtggttaataattcagatacagcacttctatttatagattcagagaacacaataaatctaagatccgtaaacaatgagttgtttatagtaacctacatacgtgatgtactaaaaaacaaaagtctccaagtaatcctaagaaataatttttctggtaaatacactccagataaaataattatgaaatatgaaataaatcaatttatttataataatttggatagcagtatgactctatcttcaatatttgcctctctaaaagctttcgaaaatattgaagcctccgaaaaaggcaagaaaggattggaacaagtaataaagtcttcttctaatatttttgaaattcactcccttcataaatttgctgttggaatgttaaatcaactatctttaataattaaatctggaagtaatcttccttttttgagtacttcctgtttcgttgcttctaaaaaaggaaatcatttttacatacttcttggtaggggccgtttcagttcccatattaatgaaaatgtatttgatgtaatttctacaaaaactatgaaagaatttaaaactgtggtttccgcaaagaaaaataaatattcccgtgatcatttcatactatactttaacaataattctgattatcaaatgctaatttattttgaaaaactaaaaaagcttcctaagtcttctgtaaccataatagacttattttgtaaaaatatgaatattgcttttgataatgtatgccttaatcacgaactagaatccacgcagaaagaaataatatttacacttggtgaaatatctgaagttcgttctcatgaaacaggtcatcatgtaaaaagagttgctgaatattcaaacttattagctttaagatacggtttaacccaaagagaagcggaaattataaagcttgcttcacctatgcacgatgttggaaaattagcaattccagactcaatacttaataaaccagcttcacttacaaatgaagaatttgaggtaatgaaaacacattctaaaataggttatgatatgctaaaatcatcaaatagaaaattaatgaaaagtgcagcaataatagctcttgagcatcacgaaaggttcgatggaacgggttacccctatggtcttagcggtaacgacatacatatatatggtcgcataactagcatagcagacgttttcgatgctcttggaacaaaacgtgtatacaaagacgcttggagcttaaataagatactgttacattttaggagggaaaaaggacgtcaatttgatccaaaattaattgaaatattttttgagaacttagataagatattaacaataagaagaactttttcggactaagttaaaggtgccctagctaaacactagagcacctttcctattttgatgacattagctttgatttttttatgcatgcatcaactgctgcaattaccgaagctctaaatccacttttttcaagtgcgtatactgcttcaatggtagttccagaaggtgaacatacatcatccttaagtttaccaggatgttctcctgtttcaagaatcattttagctgctccaagtactgattgagctgcaaacttatatgctttttccctagtcattccgttcaaaacagcagcatctgccatagcttctacaaacatatacacataagcaggtgatgaaccacttacccctgttactgcattcattaaagcttcatctacaacttcacattttccaaatgactcaaatatctccgttacattttttagttcacctttgtctatttcctcacatggtgatatagctgtcatagcctctcctacaagcgctggagtatttggcatagcccttactactcttatattgctatttttaaacataattcttgttttctctattgaaacccccgctgctattgcaactattataacactttgttgtactaaatccttgatttcacttataaccttttcgtatttattaggtttaacagataatacaataatatctgcctttaatgcaacctgcttgttgtcatttgtagttaaaactccgcattctttactaatcttctctagcttttcattagaaggattacttacaattatattttcatttggtactacctttgccttaaccattccctttattattgcctgtgccatattcccgcagccaataaatccaactttgctatccatcttcttcactccttgaaaacaaacgattttttatgatataatcttatgaataaatgtatattttttattatacaataaaatctttttatcagctaataatttataaaggaggctgcgttacttaaaatattgaataatcaatcttaaatattattattataaattcacaaaatatttatacaatattttagtagcaaaacattatgaatacaagagaaaaatacttgagtaatgtaaatagacttgtcataaaagtaggaagttcaactttaacacatccaagtggacttcttaacttttataaaatagaacatattgtaagacaaattgcagacttacataatcaaggcatcaaggttatactagtttcttctggtgctataggtgctggaattgggaagctcagactaaaagagagaccaaaaaccattccagaaaagcaggcagcagctgctgtaggtcaaggtgttttaatgcatacttacgaaaagctttttgctgaatatggtcaaattgtagggcaaatactaataacacgagaagacttatctagtaagaaaagagttgtaaatgttcaaaacaccttttcagcacttcttgatcatggaataatccctattgtaaatgaaaatgatgctacagtcgttgaggaaataaaattcggagataatgataccttatctgcaagagttgcaagcttaataaaagcagatttacttattttactctctgatatagatggtttgtacgattcaaaccctgctgtaaacaaaaatgctgttttaatagatacagttaacgaagttaatgaagaagttaaagcatcagctggtggcgctggttcaaagctcggcactggtggaatggcaacaaaaatcagagcagcagaaatagctactgaaaatggaatatcgatggttatagcaaatggtgaaaagcaagaggccataagaaatattttgaattttgagaatgagggaactctctttatacctaaaaacaaataaattttattatatcggagggttaaaatggatataaaagattacgttattaacatagctaaaaattctaagcttgctgcaaaaaaactttcttacgcagacactaacaccaaaaataaggcccttatagaaatgagtaaggctcttttagaaaataaggactatatattatctcaaaataaaatagacattgaaaatgcagaaaaaattggtacttctaaagcacttatagatagacttactttgaacgataaaagaattactgacatggcagaagcacttataaaaacctcctctcttcaagatccaattggagaagtaataaaaatgtggaaaacacctgatgagcttcaaattggtcaaatgagagtgccacttggagtcattggaataatctatgaggcaagacctaatgttactgtagatgctgctgctctatgcataaaatccggtaactcagtaatactcagaggtggaaaagaagctataaattctaacactgctattgcaaaaataataaaaaatgctgtagtaactgctggtcttccagatggttcaattgagtttatagatatcaccgatagagaaaccgttaatgtaatgatgagattaaatggtcttatagatgtattaattccaagaggtggagcagggctcataaaaagtgttgttgagaactcttccgtacctgtaatagaaacaggaaccggtaattgtcatgtatatgtagataaatatgctgattttgataaggctgaaagaataataataaacgctaagcttcagcgtccagcagtatgcaatgccatggaaagtcttttagttcacaaggatgtagctcatgaatttcttcctagaatttcgagtaagcttaaggagctaaaggttcaaataagaggctgcgctgctactcagaaaattgtaaaagatatagttcctgctactgatgaggatttcggaaaagaatttttggacttaatattatccgtaaaggttgttgattcacttgaagaggctattgatcatatatttaaatatagtacaaagcactctgaagcaataataaccgaaaactatactaacgctcaaagatttttgaaggaagttgatgctgctgctgtatatgtaaatgcttcaacacgattcacggatggcgaacaatttggatttggcggcgaaataggtataagcactcaaaaattgcatgcaagaggtcctatggggttagaacagcttactacaacaaaatatgtaatttatggagatgggcaaataagaaaataatttttagggggattaatcatgaaggtttctattggtcaagtaatcgaatttaaaacagatcattatatcagtttagatttgggcggaaaagttttagtaaaaaagggagataaagctagggtagtaaaaaaaattgatgatattacgggtgaaattgtttatcttaccggagaagctgcaggtaaatgtcaacatcttatgctggaagtaaacgatgatttagatgctgatgcaatagcaaaaaaaatcttaaatgaacttcgtggggaatagtaattaaaaaatgacaggtgatacgctaagttaccacttgtcattttttatcaataataaacttagggggcgactatatgtttgaaataaaaaggggaagcttaacacctgaagtattcaattctttagctgaatctgttggctggggacatccttcaattgatcaagttgaggaagcactaaaaaattcactttacacagcttgtgtagttgatgggagtaactttattgccatgggaaggattgttggagatttaagtatgtcttactttataaaagatgtagccgttatgcctgaataccaaaacagaggtattggtaagcttcttatgatggatatgctttcatttattgaatctaaaacacctactggttggaaaacttgcattgaactattaagtgctcatggcaaggaaggcttttatgaaaagtttggctttcaaaaaagaattaaagaaaaaaacggctgtggtatgactttaattatacgatttaaataacaacaaaggctcttatttttatgagagccttataatttttcctttataagtcagtaaattaaaacaacaatctttacctatgatggtgagctatctcaaaaagttctttaaataaaaaggttagaaataatataagcgatattaatttaccttttttatcatcatgtataaattcccttgttgttgcttgtatcatgtctattaactctacaaaaatgaacatacaaagggaacctccaaaaaaaacaccagctatatacgataatgtcaatagctcatatctgttttttataatacatcctatttcaataataattaaaaaaattagtggaggaccaaacacaagtcctaaaaataatttatttctgttctttaatatcaaataatccttaatcagtttcttctcactactatcaaataagttcctatccttttttcccaataatatcgcctacccttatttctaattagtacctgaaagaacatttcttgcagtatcccatacatctttaatatccttagttacattattaaactgactatcacccttagcacttttagcatcatatactatactagccccatttgatgagccatttattgctgcataacccttttgaataagtgatggacctttttcaactatttttaagtctctcataatcttagatccttctacccagttaccaacttcatatgttgtccataaattcttcacagtatccccagcttttaatatctttaagctatctttgactgaaccccttccaaaatacatatcagctcaataatagcctacataccctactgttttcccataaccacataattcacttgcatactgattatttttattgtttgtaaacccatctatacctttaccaaccaaccaaccggttcctcctcctaaatattcatacccttcttgcaagtaatttttattattacctactttatcaaaatcaccttttccaatagattttaagtcttggactccattatatacggagttaacaccatgtaccaatgctactaatgatccacctattgctaaaagacttactcctcctgatggtattgaacctgctatctctccaactatggttgctactgatgcagcaattgttaatactccaactactatttctactcctgtatacaaataagcaccaatatgatacttattccatatctttatagcctttttaaatggtggtaagttacctatatatgtaatatcatttttaacttcttcttttgtatttttccaggcagtttgcccccagtcaacacatgaaccaacaacccctccatatttctctgtatttgttaaaagccctatggattttctataatcgtagctactagcttttaacctttcagaacattttctatctacttcctcaaatttatttattgcataatctatgtttttacctattctttcaatcttagttccaagttgatttattgacttaaattctcttcctatttcatcaatctttgttcttacccttgatgaattactgtcactttcaagcttttgtaaagctgaattaagatttttctttgcactgcttattgaatccaatgcaaggttaatattttttcttgtgcttcccattccaattgtacttattcctgttgttaattccgacatttgtatacctctaatctatatattgcttaaatatatttcttgcgaaattttaatactttaaatacatattgtattgttatatcatataattttccaataaatttatcaagtatttttaatattattaattttaatattaaacttattgcacctaatatataaaaatagccgtcagtatttgctcatgctatagaaaatgagcaaatactgacggctaaaaaatccaaacttattttatagtcatatatattattagaattctgcacttcctgttgttcttgggaatggtattacatctcttatatttgaaatgccagttaaatacataatcattctttcaaatccaagtccatatcctgaatgcttagtttctccatattttctaagttcaagataccaccagtagtcttctttatttaaatttaattcttccattcttttttcgagaacagcaagtctttcttctctttgacttcctcctataatctctcctactcctggaacaagtaaatctgctgctgctactgtcttgttgtcatcattaattctcatatagaaagcttttatatccttaggataatccgttacaaacaatggctttttaaataccttatcagttaaatatctttcatgctcagtttgaaggtctattccccacttaactggatactcaaatttttctcctgatttttcaaggatatcaacagcttcagtataagttattcttccaaattcgctgtttacaacattgtgtagtctatcaaataaccctttatctattctagtattaaagaattccatttcctctggagcattttccataacgaagtttattatatacttaaccatttcctcagctgtatctagatagtcgctaagttctgcaaatgccatttcaggctctatcatccaaaattcagctgcatgtcttgtagtgtttgattcttctgctctaaatgttggtccgaaagtatatacatttctgaaagctaacgcaaaagtctctgctgaaagctgaccactaactgtaaggtttgctttttttccaaagaaatcttttgaaaaatctatatttccctcttcatttttaggtggattttttagatcaagagttgttacttgaaacatttctcctgctccttcagcatcacttgcagttattagcggtgtatttacatatacaaagtctctttcctgaaaaaacttgtgtactgcatatgctgctaaagaacgaactctgaatactgcagaaaaagtattacttctaggtcttaagtgagcaatacttcttagatattcaagagtatgtcttttcttttgaagtggatagtcattgtctgaattaccttcaagcgtaatattttcagcgtgtatttcaaatggctgcttagcattaggagtaagcacaaattctccttcaacagtaattgttgagcttattataaacttagaaatttctttaaaattatcaagtttatcatcaaaaacaacctggatgttcttaaagaaacttccatcattgatttcaataaatccaaaagatttagatgctcttatagttcttacccagcctgatagtcttactttttttccaccaaattcactggataatctataaagttgttttacaagtacgttttccatattttaccctcctgatttgacaactttaggattccatgtggcgtttctgtagtaaacccaatttgcctataagtctcaataaatagacctatatagaaaccctataagtttaactttagtttcttttatagagaaatagcctcaactattaatttatacatgccaaaatatcgaccactctattcgatattttagcatatataaattaagtttttgaagtatttctctataataatatccaatttactataatatcataataccattgtatgtcaacgaagcaactatatcgcctatactatttaaattttctttcgtgctctaatagccacttttttctccaaattccgccgtcatacccaataagtcttccatcacttcctattactctatgacatggtattattatggggatcttattcttgttatttgcacccccaactgctcttgatgcattcttatttcctatggcttttgcgacttcaccatagcttacaacctccccataagaaatccttgtaagctcattccaaacctttttttgaaattcagtaccatctataaatagccttaaatgaaattgtttcctttttcctctaaaatattcatctatctgaatcaaagcagcttttagtacatcactttgaaaattttcctctcccatagcttcaacaaaatttatctctgacaccttttcatccaatgcctttatctctaaatttccgattggagacttgtaatatgcacattcatttttcgcattcatattataactcctcacttgttaaatttgttgcttaatattatataccacacagcaataataatctataataattaaagggggaagtcgcttcaaactttccaaaataataaacagggggcagaaaaaatgaaaaatttatcttcacttgaatccttacatatggatatgaataaattaattgtatttagagatcttttaaatgatccaatagttgatgatttaaaaacacttcttttagaggtaaaatccgaagaaagaaaccaaagtaaaattcagaatatttactataatattgttcataatttaataaagcactcagaaacctgtggacttaagggtgatttactaaaatcctactttgttcattcaatacttaactctaaaaacttctttactggggcagtagagaaatgtggcagcaatatagaaaaaagtctatacaaggctgcattaaatgatatctgtattttgcaaaagctttcaaatttaaatcttggtacactagctgatgaggatgattcacttataaaaaattattttcctactttaaataccaagaatgtaaatatgtttgaagaaaacgaattagaaatacttaaagccgcttctccagaagatatgcttaaaaagattattcaatactattttaaaataggctctggagaaatgtctaaaaatatagcttttaggtgggacaatggtcttgttggtattcctgattatgactatatagacctttcagatataataggatatgatcgtcagaaaaatgccttaataaagaacacagaagcttttttaaatggacatgctgctaacaatgtacttttaattggagctagaggtaccggaaaatcctcttctgttaaagcaatgattacagagtactattcaaaaggactcaggcttgtagaaataactaaaagtcagcttttatgctttcctgacatccttaaggaactcaaaaatagaggcaaatactttattgtatttatagatgatttgtcctttgaggaaggagaaattgaatacaaacaaatgaaatccttcttagatggtggaatagaaaaaataccttctaatgtgcttgtatacgctacctcaaatagacgccacttaattaaagaaacctggggagataaactccaaaacggggaggaacttcacaattccgatactgtaaatgaaaaactatctctttctgatagatttggattaaaattaacctatgtatcacctgaccaaaaggaatactttaaaatagtagaaggtttagctaaaaaattgaacttagatatttctgatgaaaacttaaaaaaagaagctgctgcatgggcattaaatcagaatggacgttctggaagaacagctaaacaatttataaactacatatcctctcaaggatagtcttacaattatatccacaagttatatttagcggaatactaaagatataaatatattaaacgactttataattattgggcattattttacttggaggtgatatagtgagttcagtaaatggtataaacctaaattccctcaattcttatatgaaggatgcatctttagcaaactacctatcagatgatgataagaaaaaaacatggaaagtaagtgactatttctctggtggtacagacgatgttcagtcccttatagagaaggatgccaacagctttgataacagtgatttcagtaaatctgttaattctttagttactgatggaactttaactcaggaacaagcaaacagtgtaaaatctgcttttcaaacagcagtacaatgtgcagcttatggctcttatacatcaaagacagctaaccctattgaaactcttgtttcttcaggagttgttacaaaggatcaaatgactgctatacaaaatgcttttaaggaatcatataattcctaaataattaaaaggtacattgctattactgcaatgtacctttttaattattaattttcttctttcttaacttcttctttttccttattttccttatcaatttttatttttgaaactatttcaggaaccatttcaattaacttacttaagtttgcacctttttttactggaagcatttgaacatcatcattttttataactagaactgcgtctggacttattctagcaccggttccaagtccgccgccttgtcctttaatacctttgttatcacctacaccgcctcctgttccacatccaaacataacagttactattggaattaatgttgtttctccaacttttataggttgaccaataacagtttcagttcttaaaaacttctccaacttagtaaataacacatctaaattttctttaacacctgacataaaattcttttcatcctgcataataaaattcctcctaatatatttttaattctacaaagcgctttatatattattaaatacacctagcccttagaaaaagtttcagcttttttcaaaaataacttttcttacatctctacttaataaaaaactaagtgtcctaattgctaaaacaattggagttatatctccatagatttttatgcttatatctaatttttcttcttcaaaagtcgggtctaaacttatactagctaaaggaactatttctgttactattggcaaaatcgcacttataatacctgtaatagacggatcataaaatccatacactccttctattttaaaaaccttaggctttaaaatattaagtacttgtctaaaatattcaagcaagtttgtaaaaatgcttttccactttttctttttcttattattcttcttttttttatacttttgtttcttgttctttttcttcattcttttgccaaataaacatacactaaaatcgagcttgtcacctttttttataaatttaattgtaatgattccaaacaaaaatactatactcgaatttatatctatactgtcatctcctatatgtgagcttagaccgtattttaccttggctagaagacatactaacaaaattataagaatggtcgccaatatcataagaaacacttttaaaaatatcattgctatcccacccttaacaatttttttattttatttactactagaacttttttatttaaatatctccctaatattttttgagtttcttttactggaagtattaatgcattacttacagctttattataaggatttttatagctaatactatacgcctgtaaaactgcttttctggttgcgttcaagtcttcgatatagttcttaaagcttaaatttatatcctcttctccctcttccttcatacaattgtcaagaattaaatccacaagattgtgcagtccctctggagctttttcattgttaagagtttctttcactcttacatccataagccttattagttggagttcttctctgcaatcttcacagtatttaagatgttcttcaacaaatatctttgataactcatcaatagtttcatcaacatagtcgtataatagcttcttatcaaacttacagctcattttttcacctccagttttttctcaaggcttttcttcaaaacattttttgccctataaattttagtcttcacagttcctataggcatatctaatacactagcaatttcatcatagcttaaatcttcataatatctaagcatgattaccattctatagtcatatgtaagcttttttatactttcctttactacttcattatttattctatttaccacttcttgttccatattataatcctctgctaatctatcttcttcttcaaattcgctatcataatattttgaatttaaggacataacattacctctattgtctcttttaaagttaagacaggtattaacagatatctttcttacccaagggtgaaatggtaagttttcatcaaagttttttatattcttaaaaactttgatatatatttcttgaactaaatccatagcatcactagtattttgagtatatccgtagcataaattatatagatacttttcatacaaatgaaataattgtgagaaggatgctctatcgtacttcttgcatcttttaagaatttctttatctatctccaaaaacatccccccatcaaatataaattacacttaataatacacatttacataaaaaaagtttcacatttttataaatttttctaactattatatggtttcgcccgaaatcttactatacttaaagtcaaaagaataactgcaagacaacacatagctgctatatctcttgataaatattgcacaccaactccctttgttataatcccccttagtatatttaaaaaataagttaacggcagcacatttcctataagctgtattaccttcggcattgcctctcttggaaaaacaaagcctgaaagaagtatacttggtaatagcaccaatattgttaactgcattgcttgaagttgggtttttgaaatagttgatatcaatattcctatagcaagagcacatattacaaaagcaaaacctaataaaagcaaaagaggtatactgccatttataggaacgttaaaccactttattcctaaaactaatgaaaacaaaaagtctatatatcctataaaaatatacggtacaagctttcctaatattatctctcctgcttttaagggtgaaactgtgagttgttctatagttcccctttccctttcacgaactaatgcaaatgcagttaaaagtatggttatattttgcataataagtcctatgagacctggaatagtaaagttttgatttctcaaattgggattatataataccctagtatttacattaacccctccttcttggaactttgagcttgttttctctccaaatccttgaagctttttcataccatactgctgccctgatacaactccactgctaaatgctgttcttgcagttgtcggatcagatccatctaccaaaagctgtacatttgattcttctctcatttgtagtttatttgaaaaatcaggaggtataacaatagctgcatgaaccttacccttatccatcttttctcttacttcttcgatacttttaactcttgatacaactttaaaatatccagtattctgaaagctttgaattaactctctactttctatagaattgctttgatctaatactgtcattgatatgttgctaagctcagtatttacagcatatccaaacaaaaatatcataactatgggcatcataatagcaattccaaaacttgctctatcacgtttaagctgtataacttcttttttaactatagctttaaatctttgaaaattcactttactcacctcccaccattttctttagttcttcaaaggaattttccaccttttgatgagtggtcttttcaacatactttataaaaacatcttctagcttatttactccttctctttctataagttccttaggtgcccctattgtcatgagcttactatcaaatataaatgccaaaagatcacagctttcagcctcatccatataatgagttgtaacaagtattgttattccttcacgagaaagagtatatatcatttgccaaaagatccttctagacacgggatcaacagcagatgtaggctcatctaaaactaagatttcaggcttgtgtattaaagcacacccaagtgcaagtctctgtttccatcctcctgaaagatttcctgttataaccccttctcttcctttaagtcctgccatactaactatatattttttcatttcttctcttttatcctttttaataccataaattcctgaataaaagttcaaattttcattcactgttaaatcctcatacaaactgaacttttgagacatatatcctatctttgactttattttatctctttgacgcctaacatcatgccctaaaacgtaagccgttcccgaagtaggttttaaaacaccgcagagcatttttatagttgtagattttcctgatccatttggaccgataaaaccatatatctttcctttaggaacattaaagcttatattatctaccgcagtataatttccaaactttttagttaagttttttatttcaatagcatccatttctcttcctccttccttattttatttctacatccataagtgttcctggagaataattaaaattcttattaagcttaactcttacttcaaatactgtagcttccttatcacttttagtttccgtatttttaggagtaaattctgactcagttgatatatatgaaacttcaccttccccagccttttttccattgtaatatactttcaaattatcatttaatttaatcttgtcacgtttggattcttctacatatatttttatatacttattatctacatctaaaaccttagcaatgtttcctccctgtcctataatctctcctttattcaccaatacttctgaaactacaccgcttccttgacttttaacatcacatctagagaggtttaggtttgctaaatcaaaagcagcttgagcctcttttagtttaccttccacctgttttttactattatctggtgtatttactggaatgctatcaaaagctgcctcagctgcttcgagtcctccttctgcttgatttttttgtattgtataaacatcagcatttatatttgcagctaaatcattttcctttattctgtctccctcatttatatctaccttgtcaatctttcctgccacttcagaagttacataaaaactcttgcattcaacagttcctgtatatctattgctttcggtattattagtacatgctgttaaactaaaacatgctattcctataaaaaaagccataattgttttattcctcattacatatatctccttttatattttaatattggttaaaagttaatgagtgagtactcacttactaatatagcatcttataccatattgtcaaccttaaaatctatattcattctaattaattgcaaaaaattaaaagaagactttagtattactatatataaccaaagtcttcatctataaacttgatgtactatttagtgttaataactccatacaacatcatttccaccatttgatcaacctgcctttctctatcaagctttattagttcagggaaaattgatttttgcacaacatacataactacacatcctataaaagttctgaccataaccattaaatctaagtctttaaatttctctttaaaatcattatgtaaaatatggccctctatcatttcctttacagttaagattatgttctccatgaattgttcctttaaatcttcttgatactgtatttctgtaaaaacaattttaaaaatctctttatttttttccaaaagctctattctatcaatcattattagcttaagcacttcttttagacttttatctttattgtcccttattattttttctaatctggttgttataatacttttacctattaattttgatgaaaacattattattctagctaaaagagctttcttatttttaaaatatctaaatatagttccttctgctatacctgccttttttgaaatttcacttgttgtggaagcattatagcctttttcagaaaaaactttaattgccgcctcaattatttctttttctctatcttcaggtgattttctcgccatttaaattcttctcctctctttaccaatgagtaattactcatttattactataccatctttaatataattctgaaatagcttatccttttacttaaagcctagttcaacaaaatcaataaaaatattttaaaatttctcatttttgtagtatactctatataacatattacaactagggggatgatataaattgaagaaattaaaatgtaaaagtctattatctgctttagcgtgccttactttacttttcactataattcctgtaaacgcatacaaagctgatactaccgtgggaataacctatgatgcccacgttcaaaatattggttggcaaaatccttggtccagtaatggcgaggaaattggcactgatggtaagggtcttcgtgttgaagcttttaaactcaaacttacaaatgcaccttctgatgctaaaatagagtaccaagctcatgttcaaaatatcggctggcaagactgggttagtaatggtttagaggctggcactgacggcaaaggtcttcgtgttgaggctcttagaataaaactagataacatgcctgactatagagtagaatactgtgctcatgttgaaaatattggatggcaagattgggtatctgatggtgctgaggctggtactgatggcaaaggtcttcgtgttgaagctcttaaaattagaatagtaaagaaatctcatcccgatgctgtcactcttaacaaagctactgaaaatttaactgtaggtgatacagatacattgtctgcaacggttacaccaaataatgcagaaaacaaaagcataacttggtcatcttctaattctaatatagtttctgttaataatagtggtaagataagcgcactagccgagggaaatgctgtaattactgctttaaccgttgatggtcaaaaggcagcttcctgtaatgtaaatgtgtccaaaggtgattatcctagggttcaataccaaactcatgtgcaaaatattggttggcaggacccggttactgatggtgctgaggctggcactgaaggccagagccttagaatcgaagctcttaagctaaatattttaaacgcacctgttggcgctaaaataaattatcaaactcatgttgaaaatattggctggcaaactcccgttagtaatggtctagaggctggcactgatggtaaaggtttaagaatcgaagctctcaaaataagccttgaaaatatgcccggatattcaattcaatatcaaacttatgttcaaaatattggctggcaaaactgggtatctgatggtgccgaggctggcactgacggccaaggccttagaattgaggctcttaaaataaaaataataaaatcaattaatgttgcttccattagtttaaacaaaagtacagatactttaactgttggagatacggattcactatctgcatcttttaatccaagcaacgctacaaacaaaaatttatcttggacttcttctgatccttcaaaggtttatgtagattctaatggtaaaatcacagcttttggtccaggaaatgctataattacagcgacttcaaatgatggcaataaacaagccacttgtacagttactgtaaatcaaagggtaaatactaaccccaatgaggttacctttgctgataaaaacctagatagtgccgttagagctgtattaaataagccaaccggtactctatataaaagtgatgtgcttcaaattcagtctatagatttaaccggaaaaggtcttcgcagtttaaacggtattgaaaatcttactaatcttcaaacactttatttggcaaataactacattattgacatagcaccacttaaaaacttgactaatttaaatactttagtacttgatgataatagcgttagtgatcttagtccattatctagcttaaataatttaaagagcttaagcttacctcaaaacaattttagcgatattacacctctcaagaatttgattaacttaaatcaccttgatttcagttacaataatgttattgatataactccgcttaaaaatctaactaatttagttacattactagcttcctataacaacataaatgatatatccgccataactaatgtaggcaatctacaaatacttggattaaactctaacaaaattaataaccttacacccctgaatacattaacaaacttaaacacactttatattagtaataacctcgtaactcacgaaggtataaataccttaaagacagcattacctaattgcactgttattggagacaatgaaccatcacaatagtgatggttcattgtctttatttaatttaagtcacatgaatcactagacaaagtatgtaaatctttaaaattaagccctgatgttaattaattacattttttacatatatagtgatataattataactgtaaaacaacataaaactaaattaagggggtatatgtaaattgaaaaagctaaaaacaaaacacttaataactgcattggcatgtctagtttctctttctacttttgcttatacaaatacctgtaaagcagccgctgacgaagctcctactgtgggtgtaacttacgatgctcatgttcaaaacattggttggcaaaactgggtatctgatggcgaagaggctggtactgatggcaaaaatcttagtcttgaagcattaaaaattaatcttaccaatgcacccagtgatgctaaaatattataccaatctcacgtacagaactttggttggcaggattgggtttatgacggtgctgaaactggaaccgacggaaaatgccttcgacttgaggcaataaggataaagcttgagaatcttcctggatattcagttgaataccagactcatgtccagaacattggttggcaagctcctgttagcgatggtgcaatagccggaactgtaggacaaggtcttagggttgaagctattagaattagacttgtaaaaaatgtacctgttacttcaattgccttaaataaagaaactgatactttatctagtggagattcagatacattgactgctaccataacaccaagtaatgcttccaataaaaacataaattggacttcttctgataacagcatagtttctgttgataattcaggtaaaataactgccattgcagaaggtagcggtactgctacagcaactattaccgctgcatctagcgacagtcaaaaaaccgcaacctgtgttgttactgtaaataaaagaactcctataacctttaaagataacaatttagaaactagcataagaaatatgataaataaaccaactggctctttatataaagaggatgtgcaaggcataacttctttttacaatactaatccaaacatacactacctagatggaattgaaaatctttcaaatcttgagtttcttacttttagtaatacccctataaaagatttaactccacttaaatccctaaccaaactaaaacatttgcaacttgataatgttactataaacgattttactccaatagctagcctaactaacttaactaatttatctcttcaaaatactgggcttagcgatttaagtgtacttaataacctaacgaatttaaaagatttatttttaggtaataacaatattagtaatattgacgccttagctaatctacacaatttaactactgtatctcttttaggaaaccatattaaaaatattaattcacttgctaacttatataatttaaacctcattgatttatcttataacattattactgatttatctagcttagctaacttatctaatttaaacaagctctatctatcaaataacaatttagaaaatattagctcattaaataagctgtcaaatttacaaactcttgatatttcaaatactcttgtaaataaatctgatgtagattcactccaagccgctttacctaactgtttaataaaatataattactaaaactcaaattaaaatatacacttttaaaggctactcaaaaatatttcataaatttcaaagatgattcctgtaatgtgtggagtcatcttttttggttcaacgattctatcatcttataacttacataccaaaactcatcaaacaatccgtatatttttatttaaattttaatataattaaaatttatagtttaaaatcaagaattttatagtataattatatagaatatacgaatcatactcatttaagggggacattttaattgaacagatttaaaattaagtatttattagctacactagcgtgttttgtatctttctctgcttttacttgtacatcttctgttaaagcagacactactgatactactccacacgtaacctacgatgctcatgtcgaaaacattgggtggcaggacccttggtctaaagatggtgctgaaatcggtactgacggcaaaggtcttcgtgttgaagctctcaaaataaagcttttaaatgcaccagctggtgctaaaataagctatcaggctcatgttcaaaatgttggctggcaagattgggtatctgatggcactgaagctggtaccgacggtaaaggtcttcgtgttgaagctcttaaaataaaactcgaaaacatgcctggctactcaattcaataccaagctcatgttcaaaacataggttggcaagattgggtatctgacggtgctgaagctggtactgacggcaaaggtcttcgtgttgaggctcttagaattaaaatcgttaagaataatgataccccagcgtcttcaattagccttagtaagtctacagacagcttaaaggttggagatactgatacattatctgctactctttctaataatgcaaacagtaaaaacataacttggacttcttctgattccagcattgtttctgttgacaataacggtaaaataaccgccttaaaggaaggtactgccaatgtaactgcttcctctgacggaaaaacagcttcctgtgcagtaactgttgcaaaagctgcaactactgacactgcaccttctttatcttactctgctcatgttcaaaatataggctggcaaactccagtaactgacggtatggaggttggaactgatggtaagggtcttcgtgttgaagcctttaaactaaacctattaaatgcaccagccggtgctaaaataacttatcaggctcatgttcaaaatattggctggcaggactgggttagtaacggcgctgaagctggtactgacggcaaaggtcttcgtgttgaagctcttagaataaagcttgaaaacatgcctggttattcaatagagtatcaagctcatgttcaaaatattggttggcaaaattgggttaatgatggtgaagaagctggtactgatggacaaggtcttagagttgaagctcttagaattagaattgttaaatccgtacctgtagattctatttccttaaacaagcagacagatactatagctgtaggaaactctgatacattatctgctgctgtagctccaactaacagcacttttgtttggacttcttctgacagcagtattgcatcagtcgatgcctcaggtaaagttactggtattaaagctggaacagccactattactgcttcatctcttgatggtaaaaaaacagcttcttgttctgtaactgtagctgataaaactgtagtcacttttaaagatccagttttggagcaagctgtaagaaaagaaataaacaaaactacaggacaactatataatactgatgttaataagataacttccttagggattataaaagatacagttataaattctttagatggaattgagcagctttcaaaccttaaacaactgtggttaaactatggaaatgtaactgaccttacccctattagtaagctaagcaatctaaaaatattatctttaaatggtgatactgatattgatattagtcctattggtaatctaactaacctaaaccaattagatataggcgaaagtaaaattagtaatattaacgttctaaataaactaaacaacttaaattatttaattctagataagaatacttcaattaaagattttagccctttgggtagtttaactaatctaacactgttgcaggcaagttattgtaatttttccgatcttactcctctagctaaaatgaagaatttaagtagagtaagtttaaattacaataacattacaagtattgaacctttaaagtcttcaacaaacttagtggatttagttttgagcggaaataaaattagtgatattactccagtagctaatttaactaatttagagtctatttcattaagctataatcaagttaacaatatttcctctttagctaaattaactaaactaaaatctcttatgcttgatcatactggcattagtgatattagctccttatcaggtttaactaatttaaattaccttggagttcaagacaacaatatagaagatattactagtcttaagaatttaactaatttagctaatttaaaaatatcccaaaacaaaataagtaatgttgatgctataggtaatctaaccaatcttactcttcttgatatgaataacaatcaaattagtaatattaatgctattaaaaattcaactaaacttatttcgttatctatgcatcacaataaagtaagtgatatcagtgctttatctaaattaactaatttggaatctcttaatttaggtaataatcctattaacgatgttactcctctaaaggatttatcacatttatacgaagtagatttaacaacaagtcaagcaaatatagattatttaaattctgttttgcgtcttggtcatgcatacaataacaaaaatcaagataattaatatttttccaacattatacacattaattaaaaaccagtacccataggtactggttttgttatgtatctcccaatttttttaaatattttttacttatatttaaactattttaacaaaattaaatctttttcttaaaaatcaagaattttatagtataattatatagaatatacgaattatactcatttaagggggacattttaattgaacagatttaaaattaagtatttattagctacactagcgtgttttgtatctttctctgcttttacttgtacagcttctgttaaagcagacactactgatactactccacacgtaacctacgatgctcatgtcgaaaacattgggtggcaggacccttggtctaaagatggtgctgaaatcggtactgacggcaaaggtcttcgtgttgaagctctcaaaataaagctcttaaatgcaccagctggtgctaaaataagctatcaggctcatgtgcaaaatgttggctggcaagattgggtatctgatggcactgaagctggtactgacggtaaaggtcttcgtgttgaagctcttaaaataaaactcgaaaacatgcctggttattcaattcaataccaagctcatgttcaaaacataggttggcaagattgggtatctgacggtgctgaagctggtactgacggcaaaggtcttcgtgttgaagctcttagaattaaaatcgttaagaatgatactccagcgtcttcaattagtcttagtaagtctacagacagcttaaaggttggagatactgacacattatctgcatctctttctaataatgcaaacagcagaaacataacttggacttcttctgattccagcattgtttctgttgacaataacggtaaaataactgccttaaaggaaggtactgccaatgtaactgcttcctctgacggaaaaacagcttcctgtgcagtaaccgttgcaaaagctgcagccactgacactgcaccttctttatcttactctgctcatgttcaaaatataggctggcaaactccagtaactgacggtatggaggttggaactgatggtaagggtcttcgtgttgaagcctttaaactaaacctattaaatgcaccagccggtgctaaaataacttatcaggctcatgttcaaaatattggctggcaggactgggttagtaacggtgctgaagctggtactgacggcaaaggtcttcgtgttgaagctcttagaataaagcttgaaaacatgcctggttattcaattcaataccaagctcatgttcaaaatattggttggcaaaattgggttaatgatggtgaagaagctggtactgatggacaaggtcttagagttgaagctcttagaattagaattgttaaatccgtacctgtagattctatttccttaaacaagcagacagatactatagctgtaggaaactctgatacattgtctgctgctgtagctccaactaacggcacttttgtttggacttcttctgacagcagtattgcatcagttgatgcctcaggtaaagttactggtattaaagctggaacagctaccattaatgcttcatctcttgacggtaaaaaagcagcttcttgttctgtaactgtaactgcacctgagccttctatagaatacagttcttgttttgaaagtgctggatgggaaaatacagttaaagacggggctgaatctggtattggaggaagacctcttgatcttaaaggtttgaaaatcaatttaaagaatgcaccagcaggagctagcgttgcatataaattatattcaaaccacggtataattgaagctaatgacggtaaggaacttatttataatggtcaggccagcatatatgctttctcagtagagttaaaaaacatgcctggatattcagttgaatatgaaccatacttctctcaaactggatggggttattggatgtctgacggagcctatatttatgctggacgtacaccccttccaattgaggccattaaaattaagcttgttaaagaaagccaagttccacaacctgcacctatagcttccattcaaatacctaaaacaaactataacataaccgctggagattcaactcgtatagattactcagtttctccatcagactataaaaataaaatatcctggacttcttctgatccaagtatagtttctgcagatgattatggttttataaaaggcataaaaccaggaagtgctactataactgcaacttcacttgatgatagcagcaaaaaagcttcttgcactgtaactgtagatgcacctatacttgtgaattcagttactttaaataaaactaatcttacattaggaattaataattatgaagatttaagtgccacaattaatcctaaaaatgctcacgataactgggtttattggtcctcttctgatgacagtatagcatctgttacttatgatgacagtgaagcatctgctacttatgatggcaggattactggaaaaaaagcaggtactgctactataactgcaacttcacttgatggcaaaaaagcttcttgcattgtaactgtattagataaaaccatacttgattcaataacctcagataaatctgatatttctttagatataggctttgttaataaattagaatatacaactaatccaaatatagcacctaaaagcattaaatggagttcatctgacaaaagcatagcatctgttaatgatgacggttatgttactggagaaaaaacaggaactgccgttataactggcactattgcaggaaaaactgtttactatacggttcatgtaggcacttataaagctccttacttatcttttaaaaatatatatttatgggcatcaatatctcaagcattatctgcagcaggtttaacagaaactcagtctagttcgttgcctcttttagaaaaagttgatgcccatggagaatatacggatgttcctccaactcactcatatgatataaatgatttgtctggaatagaacaatttacagggattaagaatttaaacctcagctataacaatatatcagatattactccacttaaaagcttaacaaagttagaaaccttagaaatagatcgtaatccagttacggatattagtgctcttaaggatctaaaaaatctaaaatctctaactttaacttacaagcacaatgatcctataactaatatggagattttaagcaccctacctaatttaaaagaactcataattcttgacggatacgtaacagatgaagatctacagcatttaaaatccattttacctaactgttcaataaaggttgaatacaagtaaaatttaataactaaaaaccagtgccaaaagcactggttttttctataaatcatccactaaagtacttgcctttgcataggctgttgatttagcctcaaaaaagtctgtttttacagaattagcatcagcatatatatcaacccaaagggctggattttcatcatatccttcatatattggttcaaatccaatggcttcaagccttctatttcctaaatactttatgtagtcttcaattagtttcttatttattccttggatattatctcctattacataatgtccccaggtaatttcattttcaacacctgttttaaccatatctttaagttctttttttatctcttctgtaaacatatcaggttcttccttttgaagctcctttattatatttctaaaaagccataaatgcgtattttcatccctattaatgtatcttatttcttgagcagaacccggcatttttccatttctctctaagttgtagaaaaacataaaaccagaataaaagtatattccttcaagaacgtagtttcccattatagcctttagaaaattttcatcactaggctcttcaacaaaattattgtatatatctcctatgaatttatttcttgaaagaagtacttcatcgtccttccactgaaataatatctcatttcttttttcaggagagcatattgtatcaagcatgtaactataactttgagaatgcacagcctcttgaaaagcttgaattgtaaggcataaattaacctcacttgcagttatataatcatttatatttcctaaatttgcagtttgtacagaatccaaaaatattaaaaaggaaagtattttatcataggctgtcctttcattgtcagtaagctttccgtagtcctttaaatcctgtgaaagatttatttcctctggtatccaaaagttattcattccctgtctataccaatctgatacccaagtatatttcatattattaaaatcatttagatttgttgtatttccatttactatcttctttttactagtttccgtatcaccattctcattaaaaagcggtcttcttgttattgccaattaaaattcctccttaagcttattccttatgctgaacagctgtcacaatctccaacggttaaagatttcgatctaacatagtaaatacttttaacaccagatttataggcttctatatataagttcataatttgcctcatagtgtaatcagtagttatatataaattaaaggattgtgattgatctatgtgtctttgtcttattccatttattttaacgcacaatttttgatctatattataggctgaattgtaaaaccagaaattttctctagaaaggtttggcgctattttaggagttatactgccctttttctcctccatccaaaacctagccataactggatctactccttctgaagtaccagcaatagttgctgtagaaccattaggtgcaactgccataatgtatccatttctcatgccatactttttaatcttagctataagagctttccacttaggagaattgtaccctctaagcttaaagtaactaccattttcccaatcagaaccttcgaaatattcatagcgtcctttatctttagctatattcatagacgcttgtatagcatagtaatttattttttcataaactctatctgtgaattcaaaatggtcatcacttgtccacactaccctattgtttgtaagcatatggtgatatccactagttcctaagcctattcctctgtatcttttatttgtaacctctgcaaaaggaacagaataataattaagatcaattacattatccatagctcttatttgggtttcaattacatattgaagctcttcatcatcatttacatcaacattacctagtacaattgaagaaagattgcacactacaaaatctccagatttagctttttgtactattatcttatcaccattttcatctataatttcatcttctaaaatatccatagcactcatattttgcattatttcggtgcaaagatttgaagagtatatcattcccttatgtttattaggattcattctattagcagcatctctatagaaagcaaaaggcgttccagtttccgctgcactttttattataagccttactatatccttaaccgacatcattcttttatctattctagggtcattaacacagtcaaagtatctcttttcccactcttcgccataataatcctcaagtgaatatcccttaactaattttatctcatgaggacacatcatataccagtttgcatctatatcttcctctgcaagcctccaaaaaagatctggataacacactcctggaaatacatcatgtgccttctttctatcatcaccgttattggttctaagctgcataaattccggtaaatctttatgccatgcatctagccacacagccacgcttccatttctaactccaagctggtccactgctattgccgtatcgttaaaaagcttaacccacggtacaactccgcctgacgcacctttaaaacctcttattgaagcgcccatagatctcacttttccaaaatacactcccattcctccaccatatttagatacgttggcaaaattatctagtgatttgtatatgccctttaagctgtcatcaacagtatctataaagcaggaactaagctgataaaacggctttcttgcatttgacatagtaggggttgccattgttgccttaagagaacttaaaacatcatagaatctcttagcccagtaaaccctattctcctgtttttctggaacagcaagatgcatagctattcccataaacatttgctgcggaagctcaagcacctttctttcaaaattttgaatcaagtatctttcagaaagcagctttatgccgctgtatgtaaataaaaaatctctatccttcttaataaaactttcaagttcgtatatatcctcttttgaataattttctaatatgtacttaccataaagtccttcatccgtaagcttcacaataaaatcataaaagcccttatatggatcttcattttcagaaatatttctgttttttctaacttcattatataaatttataacatatagtctagaagcaccttgaagccactttggttcatctgccttagtcaattctagacatacttgaattacagatttaattatctcctcttctttcatgccctcacgcgttatatgtttaagtacatttataagtttagttttagtgtatatattttcatcatcattaatgccctttaaggcttccttgcacaaattttctacatcaaccatactattacgcctccacaatatgtagtatatatattctgttttttctattcgaaccacaatatatcgctttgtatattataataactatatgctacatttgtaaaataacttttagcctaaattcaagcattaatttatacctttatagtatagtttcgttttcctttattttttgtatgcatgtaattaaaaatattattgaataaatcagcacacaaaaactcattttatctatcaatcttaaatttaataaacataatttaaatatcaatttatatatattaattagaggtgatatgtaaattgaaaaaattaaaatctatgtgctcaccaattatttttataacgtttttgatgttttttaactttgaaggcttaaatatcaaatgtaaagcagatatcaacgattcttatgtaggagtgacctataatgcccatatacaaaatatcgggtggcaaaattcatggtgcattaacggagaagaagctggcactgatggtaaaagtctcagaatggaagctctaaaaattaatctcactaatgcaccagctgatgctagaatactctatcaagcccacgtacaaaatcttggttggcagcaatgggttaatgatggtaatgaagctggcactgatggtaaaggccttagaatggaggctcttcgagtaaaacttttagggatgcctgactattcggttgaataccaagctcatgttcaaaaccttggttggcaaaattgggtaaaggatggtgaggaagctggcactgatggtaaaggtcttagaattgaagcaattagaattaagattattaataaagtgcatcccgattcaattacgctaaacaaatccaatgaaaatttagctcttggcaataccgataaattgtccgtaaccttctctccagataatacaactgataaaaatgttacttggaactcttctgacagcaatacagtctctgttgacaaggatggtaatataactgctttaagagaaggtaccgctaacataaccgccacatctgttgatggtaaaaaaaatactagctgctttgtaactgtagtcaaagcagaaaactaagctttagtaacatttaagaatatttattatcagtattaggtttgacctccaaatcaaactactatcgttagcttagtattttaactcaaaacaatttaatttaacacgtaatcttaagaaaacagttcaaagctttattaaataaggcactgaactgtttttaattatataaaaaaactaattacaaactccagttaaagtaatcttttaaatttacaccatacttatttttcatttaaaaaaagtattttttgtatttaaaatacattttttgtagtataattatatattgtaatataatatatggttaatagggggattatgtaaattgagaagattaaaaactaaatttttattcactactttggcgtgttttgtatcattttctatttttagttctacaaacacatacaaagcagatacaaccgacactaatacggttggtgtaacttatgacgcacatgttgaaaacattggctggcaagctccttgggctaaggatggtgaagaagctggcactgatggtaaaggtcttcgtgttgaagccttaaagcttaatcttactaatgcaccagctgacgctaaaataacctatcaagctcatgtacaaaatataggttggcaagattgggttcaaaatggcgctgaagctggaactgacggcaaaggccttagagttgaggctattaaaataaagcttctaaatatgcctgattattcagttgaatatcaagctcatgttcaaaatataggttggcaagattgggttcaaaatggtgaagaggctggaactgatagcaaagggcttagaattgaagcacttagaattaagcttgttaagaaagtacatcctgattcgattacctttaatagctctcaaatgggcttaaaagttggagaaacaagcacactatctccttcattttctcctagcagtacaactgataaaaatttaatctggaattcttccgacgcttcaaaggttagcgttgatactaaaggagatataactgctttaagcgaaggtacttcaactattacagccacatcaactgataacggaaaatccgcatcttgcgttgtaacagtaactaaagctgatccaaaactacagtatgaagcacatgtagaaaacattggttggcagcttcccgttaatgatggtgaagaggctggtactgatggacaaggactcagggttgaagctcttaaaataaggcttttaaacgcacctaatggagctaaaatagcctaccaagctcacgtacaaaatattggatggcaagactgggtctatgacggtagtgaggctggtactgacggcaaaggccttagagttgaggctattaggataaaactagtgaatatgcctgggtattcaattgagtatcagtcacatgtacaaaatgttgggtggcaaaactgggtctctgacggagatgaagccggaactgatggaagaggccttagaattgaagctttaaaaattaagcttgttaaagctgtacctatagattcaatagcattagataaccctccagctactttaaatgtaggtgatacagcttcgctaaatgcagtaattaaacctgataatgccacaaataaaggcttaacttggacttcttctgataataaaataatttctgttgataatagtggtaaaataactggtatcaataaaggtatcgcaaccattacagctgcatccaatgatggttcaaaaaaagcttcttgcactattactgtaaatgacaatccaaataatatagtaacctttaaagatagcaacctagaagctgaggtaagaaaatgcataaataagccaactggtactttatataaaaatgatgttacagggataacaactcttaatgctgaaactaaaaatataaactacttagatggtattgaaaatttagtaaacctaaaaagtttgtacctgccaaataataatataagcgatattagctatcttaaagctttggataacttaagaacattacaattagataagaatccaattacagacatcagttccctgtctaatttatctaacttatccgagcttgatttaaatgatataaaaacaagtaacttcagtgctttaaaaggcctaacaactttgcagcatctttctttacttgataataatataaatgatatcagctttgtttcaaacctactaaaacttcaatatctttatttaaacaataacaaaataaccgatatatcttacttaagtaatttagcaaacttagacaacctctcattgtcaaataacaccttgagcagtttaagtcctttaagcaaactaaataatttaacatcgctatatttaataaataataagctaactgatgtatccgctttaaatagtttaagcaatttacaatatctttctttaaatgataattccataaacgatattagtcctctaagtaatttaaacaacttaagatttcttaatttatcaggtaattcatccttaaataatattgcttctattaaaaccctatctaaactaacattagttaacttagattatactaaagtgactgacctaagtcctcttaagagcataagtactttgactacaattagcttaaactatactaacataacaactttaactccactagagagtttatccagcttaactgatctttatatagttaatgattcctcgcttaatcagtcctctgtatctgaatttaaagcagcattaccacactgtagtgttacaacatattaacaaatggtaagaggggagaatatgtaaaatgagagaattaaaatttaaacatttactatctaccttagtatgttttatatcattttctatttttattccactaaatacatacaaggcagatactattaatactacaaatataggtgtaacctatgatgcacacgttcaaaatattggttggcaaactccttgggctaaggatggtgaaactgctggtactgatggcaagggacttcgtattgaggctttaaagttgaaccttgttaacgcaccagctgatgccaaaatactttatcaagctcatgttcaaaatattggctggcaaaactggtataaagatggtgaagaggctggtactgatggcaaaggtcttagagttgaagccattagaattaagcttgaaaatatgcctgattattcaatagagtatcaagcccatgttcaaaatatcggctggcaaaattgggttcaagatggcgaagaagctggtactgatggacaaggtcttagagttgaagccattagaattaaaatctctaagaaggttcaccccgattctattaagcttaataagaatagcgaaaacttaaaggttggtgacacagacacattatctgctttattttctcctgacactacaacaaataaaagcttaagctggacttcttctgataaaagtacagttgtagttgatgacactggtaaaataactgccttaaatgaaggtactgctaatataactgctgcttctttagatggtcaaaaaactgattcttgttttgtaacagtaaccaaagctgattctaaaatccaatatcaagctcatgttgaaaatgtaggttggcaataccccgtttatgatggaaatgaagccggcactaatggacaaggtctacgggttgaagctcttaaaataaatcttctaaacgcacctattggcgctaaaatagtatatcaggctcatgttcaaaatgtaggttggcaaactcctgttagtaatggagaagaagccggtactgatggtaaaggacttagaattgaagctataaaaatgcatttagagaacatgcctggatatctagtagagtatcaagctcatgttcaaaatattggctggcaagactggacacgtgaaggacaagaagctggtactgatggtaagggacttagaatcgaggctattagaatacgccttataaaagcagttcctgtagactcaattactcttagtaacagcaattataccctaaaggttggtgatacatatacactgactgcaacggttaatccaggcaatgcaacaaacaaggatatacattggtcctcttccgatggatcaaaagtttctgttgatggtaatggtaaaataactgcattaagtgaaggtactgcaactataaccgcttcaagcagtgatgatagtaaacatgtatcctgcatcgtttctgtaaatggaatagtaaataatcccgtagtcttttcagataaaaatttggaggcagctgttagaaactccataaataagcaaactggaacgttatacgaaagcgatgtacaaaatatttcttcattaaatgcaaataatgctaatataactgatttaactggaatagaaaatcttaagagtttagacaccctatatttaaatagtaatagtatatcgaaccttactcctttaagatctttaataaatttgcaaaacttatatcttggaaacaataaaattacagataccactgcattatcgagcctaagcagtttacaaagacttgatttatacggtaacgctctaaatacttttgatggaataaaaaatctatctaacttaacagaacttgacttatcaaacacaaatttaagtagtcttgcttttttaagcgtagtaacaaagcttcaaaatttaaatttgtcttcaaataaaatagctgatatttctgcattaagtaatttaactaatttaaatcagcttgatttatccactaatcaaataagcaatatttcttctttaaataatctaattggattaaatattttaaatttaaattctaataaaataaacgatatttcgtcgcttactaatttaaaacaacttcaaacactatctctaaattcaaatactatacaggatattgatgtattaaaaaattttactgtcttaaacgtacttggtttatcaaataataaaataactgatatttctacattagctaatttaaattccttaaaaaatattagcctaagcaataatcaaataactaatatttcttgcttatgtaacctcactaatgctcaatacttacatctggaaaataatcagataaatgatatttcagcattgaataagcttaaaaatttggcatacctttatttaaataataatcaaataactgatattactgctttaggatttctagacaaactaaatacactttatctttcatataataagattactaaggtagattcacttaaaaatctaacaaatcttaaaatacttattttagctgaaaacaatattacttcaactgaccaaacttctttaaaggaatctttaccaaactgctctattgtttattaatataaaaggctgtatcacctagtgatacagccttttatttagcctatttcttcattgtttccacttgtaaattgactgttataaagatcagcatagaagcctttcttctctaataattcttcatgatttccttgctctataactgaaccttgattcataacaagtattaaatcagcatcacgtatagttgagagtctgtgggcgattacaaaacttgttcttccttgcataagattattcatagccttttgtattgcaagctctgttctagtatcaacactacttgttgcctcatcaagtattaatatttgagggtttgcaagtataacacgtgcaatagttaaaagttgtttttgtccctgtgatatatttgaagcctcttcatttattacagtgtcatatccatcaggaagcgttcttataaagtgatctgcatgtgctgcttttgctgcccttattatctcttcctcagttgctccatcctttgaataagctatattatctcttattgttccattaaacaaccaagtatcctgaagaaccattccaaacattccacgaaggtcatttctcttcatttcttttgtatttacaccatctacagtaattttacctgcatttatttcatagaatctcataagtagatttactatagttgtctttcctgcaccagttggtcctactatagctactgtctgacctggttttacatctaagttcatatcgttaattaaagtagatccttctttataaccaaatttaacattttcaaatctaactgcacccttagggaactcaacaattttagaatcctcagcatcttgaatttcttcctcttcctcaagaagttcaaatacacgttctgctgcggccattgttgattgtattatatttgctatatttgcagtttgaattataggcattgtaaataacctattgtattggaagaatgcctgaacatctcctatagatatcattccctttgttgcaaatattccacctgcaacgcacactgcaacatatccaatgttattgataaagttcataagtgggaatataattcctgaaataaattgtgctttccatcctgatttatataatctgtcatttatttcgttgaatttctctatcgattcttgttctttattgaaagctttaactacaatatgtccagtgaacatctcttctacgtgtccatttatcattccaagctctttttgctgtcctgcaaagaacttttgagatttctttgctataaacatagttacaaatccagcaacaggaagtgttagaacacatataagtgtaagccatccacttattgtaagcatcataataactacacctataacttgaagtattgctgttataagttgtgttaaactctgttgaagcgttgttgcaacagtatcaagatcatttgtaacacggcttagtatttctccatgagtttttgaatcaaagaacttaagtggaagtctattaagcttctcatctacatcttttctcatgttataaactgttttctgtgcaactcctgccattacaaatgactgcaagaaactaaacaacgaagctactgcatatagtcctataagctctaaaattattacgcctatagcatcaaaatcaattttactaccatacttattaattgtatcttttttagcattactaatctttttctgagccgcctttatttgagcttgcgccttagttaactgctcttctccctttgtcatttgagcttctgcttcagctaccttaggaacttgagccatcataggattagcttttatttgagcatctaattttgccttttgagcatctaaatttgatttttgtgtacttaactttttagcggcatcatttacttttttctcttgaggatttattttacttaatataatctttcctttaattccgtctgcaagctttgttgttgcattacccataatcttaggtgaacgaacattaaaacatacactaaatattgctgctattacaactattaaaaatctcattttaaaaggtgctaaatatttaagaagctttctgaaagtccctttaaaatcctttgccttttctgctggtcttcccattggtggaccgccacctgggcctttactcattccagtggatttttttctctcactcatgccatttcctcctcactaagctgtgaagccactatttcatggtatacatcacagttattaagtagctctttgtgtgttccaattccaactacttttccttcatctaaaactattattctgtcagcattcattattgtacttactctctgtgccactattataaccgttgagttctgagtttctttacttaatgcagccctaagcttcgcatctgttttaaagtcaagtgctgagaaactatcatcgaatatatatatttcaggtcttttaactaaagcccttgctattgaaagacgttgtttctgtcctccagatacgttacttccaccctctgctatttctgattcaaaaccatccttcatgttagatatgaattctgttgcctgggcaatctcagctgcatgttttatatcttcaaaattagcattatcatttccaaattctatatttgaagtaatgtctccactgaaaagtattgccttttgtggaacaaatcctatttttgatcttaattcgttttgtgtcatctttttaatttcttttccgtctacaagtatttctccatcacttgcctcataaaatctagggataagatttatgagagttgattttccagaaccagttccacctattatagctgtagtttctcctggttttgcgctgaaagaaatatttgataatgcaagttcttctgctcccggatagctaaatgatacattcttgaattccacatatccttttttatcctcagctgatttctcaggatttttagggtcttctatttctggtttcatatcaagaacttcatttattcttactgcggatgcttgggcacgtggaataagtacaaacattacagcaaccataagaactgatatcattatttgcatagcatattgagtaaatgccatcatatctccaacttgcatacttcctgcatctattctctttgctccaaaccatataattgatatacttgttaaattcattacaaacatcattataggcattaatcctgccattattttattagctctaattgcaagattagtatagtcagcatttgcttttgcaaaacgttctttttcaatttcttgtctatcaaaagctcttataactcttatacctgtaagtccttcacgtagcactaagtttatcttatctatttttttctgcattactttaaagtatggaacaactattcttcccattattcctatgacaattgctaaaaatggtatagcaactgctaaaactattgtcaattttctatccttctgcaatgctaatataagtccacctatactcatcataggcgctgtgataagcattcttagcatcattataacaacattctgtacttgtgtaatatcatttgtagtacgtgttattaatgatgatgtaccaatcttatcaaactcgttcatagaataactttctactcttgtaaataactcttttcttatatttcttgtaagtcccatagtaatttttgaagctaaaagactaactagtatagcacaaatcatacttcctgccgttactaggatcatctttcctcctgtttgccatatatatggaacatctggtgtgctaactccttttgaattaacttttgaaataccattgtttacgatgtctgacattagtgtgggtaaatacaagtcagccattgattgaaaaaatgctaggaataataatgctattactgatatccaaaatggctttaacttttttagtagtttaatcattatttcatctccttatatatattaaaaccttcgtaaaactcaatctagatacgttctaaatatttagactcagcttaacttggttctttattgattgtgttgcttgttcatgtaatcagctaaatctaataaaagttctgcaaatttttcacttttttcattacccatatattcaattaagccttcaataaacttccaaaaattcttctcagctttttttaggagctcatcacccttttctgtaatatgaactcttacaactcttctgtcatttaagtccatacttctctctacaaaaccatttttctccatactgtttatttgttgagttacagttggtgatgctatctttaatcttttactaagctgggataccttaaccccgccttcttcaacttcaagagatttttgtatgcatactaaaagcatcatttctgcatgagttattccatctacatgctttggatggaacttaattttcctaatttgattaagtgctaaaagtaacttatctgctatctctttttctttattatccattttatcctcctttaaacacagttttcattatcacaaattaatttatataaaaatataattaggtttttaaattattagcctaataaattattaggtaacctaattatatttctatttttatcttatgtcaatacagtttatataatttttatatttgcataatatgagataaataaaagctttgaatctagatagattcaaagcttttatttatctcatattcttttcagtataataggcaattcctatagctccaggtccaacatgaagtcctattacgggtcctatgtcacatattataggatctactttaaacttattctttatggtttctgcaagtcttttagcttcatcataacaatttatatgatgaaccgctattcctcccattccaaacttatctgtatcctctagaactctctgaaccatggtttctacagctcttttctttgtcctgattttggcaaatacagatgtttttccgtcttcaactgtaagtattggaattatttttaatagatttcctataagcgcacctgcaccacctattcttccacctttttttaggtagacaagattatccggtataaataaaaatctacttttcttcatattctcttctgctgcaagttttacttcttctaagctttttccatccattgctgccctagctgcacttatagctgcaaaaccaagctgcatacaattagatctcgaatctagtatttctattttggcatctttatacttttcaataaccatgtctcttgcaatatgtgctgtagagtacgttccactcatatccgatgatatgaatatgcataagagctcatctccaacacttaccacttcctccataacactgcacaaatcttctatagacggctgagaagatttaggaattcccttctcattcattttttcgtaaaacacttcattacttatatccttttctttaaaactctcatcatcaaaagacacactaagtgacactaaatttatatggaatttatttatcaaatcattattcatacaacttgtactatctgttaaaatcttcactgccataatacgcatctcctattcatagaatcatgccttcttcataaccttttattaattcacaatatagcatatattaataaaaaggtaaagtattccttagaaaacaaaaacaaagaacagaaattgatgttctttgttttatatagtatcattatatcgataaaatcagcttacttcttctttacctctatccctagctgtcattttactatgcttagaaccataaacaaaataaattacaaaccctataagaagccatgcaccgaatcttaaccatgtaaacagcggaagatgaatcatcatgtaaaagcagaagaatgctgttactaaaggagtaaatggaactcctggacatttaaactttctttcaacattaggcatagtatatcttaaaactattaccccaaaagatacaagtatgaacgcaaataaagttcctatattacaaagctccattatcatttttagaggcaagaaacctgctattatggataccaacactcctgttattaccgtgcataatcccggagtactgtgcttcttgtttacgcttgagaatacctttggaaggagcccatctcttgacataaccataaatattcttatctgaccatacattataactaataaagttgaaatcatacctaatactgcaccaactccaacaagcgctgatccccatgttatacctatgctagataaggctcctggtaatgcgttatttatatcaattttagtataaggaactattcctgtgagtattatagctactgacatatataacacaacaactactccaaaacatataagaagtcctttgggcacatcctttttaggatcttttgtttcctcagcagttgttgctatggcatcaaaccctataaatgagaaaaatattattgcagccgctgacattattccattaacaccatatggtacaaaaggatgataatttgtaaccttaacatgagtaattcctaaaaatacaaagagagctattatacatatcttcactccaactattacattatttatcttagcactttctgtaactcctctgtataatagaaacgttattaccaaagttataaaaattgctggtaaatctacaattccacctgataaaggtgattttgtaagagcatctggcacatttactccatagttttttactataccaataagcgtgctggaccatcctgaagaaattgctgaagccgctaccaaatactcaagcattaaatcccaacctattatccatgctataatttctccaaaagcaatatatgaatacgaatatgtgcttcctgatacagaaaacatagatgaaagttcacaatacgtaagagaacataatccacaggttacagctgctactaaaaatgaaatcactacagatggacctgctaattttgctccttgtccagtggatacgaaaattcctgttccaactacagcgcctatccctatcgccgcaagatcaaaacttgtaagtccccttttaagattactactgctggcttcatcttgaaaatcctcagcagtcttctttctaaaaatctccatacacttcatcccccctaaaatataaataaattccgctcatagagaccacttaactctagcctccgcaacaattcacgtcctgcaccatatgaaaatttatataattatacaaatttcaattttacatttatataaccgtatttttattcacaatttcacaaaaccaaattgtataattatcaaaaatatatgcgttaatatacatattataaagccaatactactaataataacgtaaaactacaagttatgcattgaatttttttattaaaattattaaaatataaagtattaactttatttaacaaaatcacacaattgaataataaattatttttttattcattattcaaaaaaactctttaatatttcttaggaaatacttatatcttatatttagaattcaactacatgttccttaacactacattaatttagaaaggatagctaattatgaactttttcattgcagataataatgaatctgtagtatcaatgctaactgatatcattgaagactatgatataggaaaagttattaatacttcacgcagtttagaatatataacctacgaagctctcttaataaaaaagatagatatacttataatggatttattaacgcctgcccaaagtggccttgaaactataaaaagtttaaaaaatccttttaaaggtaagataatcgtgatatctcagattagcgataaagaagttataggaaaagcatactctcttggaattgaatactatataattaaacctataaacaaacttgaatttataaatataattgaaaaagtatctaataatattcgtttacaaaaatctataaatgatataaaaaatatattatctcttatggatgctgataaaaaagtcaaaaaaacggaaagcttttctgaggaagataatattatgctttcgggcgaatttattctcacagaactaggtatactaggggaaaatggaagtaaagatttattagacattcttatttgtatacacaatgagcttaatcccaccttaaatgattttcctccactaaaaaatatatttcttaaacttgcagaaaaaaagctttctaaatcggcccctcaagttgaaataaaaaaagaaataaaggcgtcagaacaaagagtaagaagagctatagcccaatctatgactcatcttgcatcacttggattaatagattactcaaatcaaaaattcgaagaatactcttcaaagttcttcgatttttcggaaatcagaaaaaagatgctagagcttgaagatgcagttattcctaccaaatcacatgttagagtcaatatgcgcaaatttattaaggtactttatatggaatctctaaaaaaatataactaaacgctctaaaataaaaatgagatgctgtttatttgagcacctcattttcccatttatttaataaaaaacactctttttcttttcaaatagcttatcaatctttattatattcaagaagaaaaatatgaatataagtattgatggaaaaccatatctgccttgtccttctgttacaaaatatacgcaagtaaacatataaaaacatacgagggaatacagtgaaaacttatccacttcttcacttttacgctttattagctttgatataacaaaaatgctataagctactataccaactgtaccaggtatgaatataatgtttcttattaaatttgtaatcacaagtaaaagatgttccaccgaacttcctaaatttgctccgttaaaagcaaatattatatcatcaccaacgtaataagtatttaaaagccttttaagtcctagttctacaaatccaataggatgggatattatccatttctttgctgcgctattaagcatatgatttttctgcgtcatatttgcttccttataggtctttgtaagtgcaatggaattctctacctttgttacatccatccaccttccccacttgttttgagaattgttatttatatataaaactattcctccattatttgatacaaaagtaaactgccccatcatctttgtgtttctatatacaaaaggtgatattacaatcaacgacaaaaccaaaactataatggaattcaataaaggtttgatgaattttttttcagtaataacctctactaaaaatattgcaaagaaaaacactaagaaaaatggcttggtcataatttcaattccagataaaattcctatgattatatatttgaacttgttattagaaaaatacacattcgcaattatgagaaatattgtagtaaagaatatctccacagcaagaatactattataaaaaatattgcatggaaaaaatataaacattaagaatattatttttctcttggcttcacttatatttaattttctaagcaaactaaaaagtgtaacgtaacttatgagtgtaagaactaagttaaacgtttttcctacaattatgcttgcaccaaaaaatttatatacatatccaagtgccacagcatatccaactgaagtatatgtatctccccacgctcctccagacgcaatgctcctcgctaatgtattataataattaaaatcagaatacggagctgtttttacgaatattacccaaataacacaaatagcaaaggctataatacccgaaaacaaataaaattttttgctttctctattcattatttcacccaatattttacctcctattaaatcaagttttaaaatgtaactaactataattatactacacgaaatccataaagattccatcaaaaattatatcatactaggatgtgtttttatatgtttttccactttaatatagtcaattaataatttatacatacttaaaaggcgttaccatttaacctttttaatggtattcagcctgagtatgaattttcttttctgtaattctatctcttaaatactagagttttggtaaaaacattgacaatactataccttcgttatagaatataaatatgaattccgacttaaatggtcaagattaaatttaatatagttcaggagtgaattttaaatgggagaaaaacttttacaaattaataatatacatgcagaagctgatggcaaagaaatattaaaaggtttagatttaacagttggaaaaggtgagattcatatagtaatgggacctaacggtgctggaaaatcaactcttatgaatgtaataatggggcatccaaaatataaaattacgaacggaaatataaactttgagggtgaagatataactgatcttaaaacagatgaaagagcaagaaaaggaattttcttatccttccaaaaccctgaagaagttgctggaataacagctagtgatcttataagaagtgctaggactcaggctgaaggaaagccaataaagctaatggcttttagaaaagagctaaaagagaaaatggcattactagaaatgaatgaaagttattcagaaagagatttaaacgtaggtttctcaggtggagaaaaaaagaaaaatgaaatattacaaatgttaatgttaaaccctaagcttgcaattttagatgagacagattctggtctagacgttgatgctgttaaaattgtttcagagggaataagtaagtttaaaaatgaaaataattctcttcttataataactcacaacagcaaaattcttgaatctttaaaacctgattttgttcatgtattattggatggaaaaattgttaaagatggagatatctctttaatgaatgaaataaatactaagggttttgttgactttaaaaaaatggtttaaggaggtgctctcatggaagcaaaaaaagacttatttaaaaatctcgagcgcggtgtttatgatataaaaaatgaagatagatacagctataaagtaaataaaggcttaactccagagattatagaaaaaatttcaaaggaaaaacatgatccaaagtggatgttagattttagattaaaatgtcttgacgtatataacaaaactgaacttcctagctggggtccttctttagatgaactcgatatggataacattgttacttacgtaagacctgatacagaaatgaaaggaagctggaatgaggttcctgatgatataaaagatacttttgaaaagctcggtataccaaaagcggagagagaatccttagctggtgttggagctcaatacgattcagaggttgtttaccacagtataaaagaagacctcgttaaacaaggtgttatatatacagatatggagacagctataaataaatatgaagatatagtaaaagaatacttcatgaaattagttcctccaagcgatcacaaatttgttgcccttcacggagcagtttggtctggtggttcctttgtttacgttccagaaggtgtaaatgttgatataccacttcaatcatatttcagattaaattctcctggcgcaggtcagtttgaacatactcttataatagttgaaaaaggcgcaacccttcacttcatagaaggctgttctgctccaaaatataatgttacaaatcttcatgctggatgtgttgaactttatgttaaggaagatgcaaccttgagatattcaactatagaaaactggtctaagaatatgcttaacttaaatacaaagcgtgctgtagttgaaaaaaatggaactattgaatgggtatctggttcctttggctcaaaaatttcaatgctctaccctatgagtatcctaaagggcgaaggtgctaaatcagaatatactggagtaacctttgctggagaaggtcagcatcttgatacaggtaccaaagttgtccacgcagcaccttatacatcttctactataagcgcaaaatcaatttcaaaaggcggtggaacttgtatatatagaggttctgttaaagttactgaaaacgctcatcactgtaaatcttctgtttcctgtgattctttaatgcttgatgatatttcacaatcagatacaattcctgcattggatttagctaatgatgaagtagatatcggacatgaagcaaaaataggaagaataagcgatgatgctatattctatcttatgtcaagaggtgtaagcgaagatgaagcaagagcaatgatagttagaggttttgtaaaccctatatcaaaggcacttcctcttgaatacgctgttgaaatgaataacttaatcaagttagaattaaaaggaaattagggtaggtgattttagactatggaaaatacactaaaaaaaataaataatattcccgtaagaacatggagatggctcggggtaaataacgtaaatataaatgaagccttacctcaagtagttccttacaataatgaatatataacttccgttaagaatgacggaattgaagtaaataaaatgtctcagaatatttcttctgacttcaatggaacctgtacttacactggaatagatgaactttcacttaatcaagtaaaaaatgattataacactggtgtttacgttcattcttctaagtacagtaaatgcagtgaacccattgttataaactattatatgaatgaagctaataatactgtagttgataacaacttaataattgcagaagaaggcagtgaaatcactgttgttgtaaactatgattctgatgaaaacacaacttcctttcacaatggattaactcaaatttatgcaaaagcaaattctgtagtaaatttagtaaagatacaaacactttctggaagtagtctccatttagatgctcacactgttaaaactgaagaaaacgctgtagtaaactatactgctgttgacctaggttcaaaatatgcagtaacaaactataccgatgatctttcaggtttcagaagttctgcaaacgttaagtcaatttatttaggtgataaagatagagttatagatataaattatctaataaatcactatggaaaagacgcaagaagtaatatagaaacaagaggagccctaatggatagaagtaaaaaaacttttagaggaactcttgatttcaaaaagggctgtaagaaatcaaaaggtgaagaagaagaatatactgttctcttaagtccacatgttataaataaatctgttccaatacttttgtgtacagaagaagatgtagatggtcagcatgcagctagtgctggaagaatagatgaaaataaattattttatataatgagcagaggttttagtgaaactgaggcaaagaagcttgtaatcgaagctgcatttaatcctattataaatcaaataccatcagaagagataaaaaataaaatctcaacaagtattagaaggaggctggaaaatgaataataagtatataaaagacttccctaccttagaccaagagtttaatggtcataagtttgtttatcttgacaatgctgctactactcaaaagcctctttctgtaataaatgcagtaaatgactactacagaaaatcaaatgcaaaccctcatagaggagcctatgctttaagcgttaaggctaccgacttatatgaaggagcaagagatgttgttaaggattttataaatgcaaataagagtaaagaaattgtattcgtaagaaatgctactgaagcacttaacttagtagcatattcttacggacttaactttataaatgctggtgatgaaattgtaatatctattgcagaacatcactcaaaccttgttccttggcagcaggttgcaaaagcaaagggtgctgtacttaagtatttgtatcttaatgaagacggaataattccacatgaagaatttgaaagtaaaataacttcaaaaactaaaatagtttcagtaactcacgtttcaaatgttcttggaaccataaatcctgttaacgacataataaagaaagcgcatagcgtaggagctattgcaatccttgatgcagctcagagcatacctcacatggaggttgatgttaaagctttagatgctgattttgtagtattctcaggccataaaatgctagcaccaatgggcataggtgttttatacggaaaagaagctcttttagaaaaaatgcctccttttatgtttggtggagatatgatagaatacgtttgggaacagaaaacaacctttgctgaggttcctcataaattcgaaggtggtacacaaaatgtaggtggtgccgtaggtttaactgctgccatagaatacttaaacaaagtaggtttagataaagtatatgctatagaaaaggaacttactgcatatgcactagaaagactttctgaactaccatatgtaaaagtttatggaacaaaggatgcttctaaaaaagccggtgttatatcttttaacgtggatgatgttcatcctcatgatgtagctacaatacttgattcatatggtgttgcaataagaactggtcatcactgtgcaaatcctcttatgaggtatatggatgtaaatgcaacctgcagagctagcttctatttttataacacaagagaagacgtagatgccttagtagagggattaaaaaatacaaggaagtggttaggttatggatcttaattctatttatacagaaataataactgaacacaatgcatcaaaacacaataagcacaaaattgaagatgccactttagttgaaaacggtcataatccaagttgcggagatgatataacccttcaacttaaaattgaaaataatgtcattgaagatgctgcttttattggcgttggatgtgctatttctcaagcttctacctctataatgatagatcttataaaaggtaaaactgttgaagaagcaaaaaagcttgttgaaacctttattggaatgataaaaagagagataacagatgaagctgagcttgagcagcttgaggatgcattagcatttaaaaacatttcaaatatgcctgcacgtgtaaaatgtgccgtactagcatggcatacttttgaagaatgcattaacgaaaaaaaataaagtgttacgcgaatttacgcgtaacactttttttataatttatctctatcagctttaagcgttatatttatactaattcccatccccaaaagtatccaaaatactggtgctacagatataacactatcattaaaaaatgctgttactgtataacttaaaaatgctataaatatccctaaaccaaatatattatatagattgtccatttcagctctaaagtataatttaaaacttgttattatgtacattataaataatgcaagtacagccatcagtgatatacttcctgtattaatagctatttgtaaatacatattatgtggtttgtctataattacacctttaagtaccttccttgctggatcatttttaggaaagaatgctgcaaaattatcaggtccatatcccataattacagtatcttctaacagcttaattgattttccccatatgtatcctcttccagagcctatactttgcttttcatactcactacccttgcatatctttgtaacttcagaagcagttgtcttaaacttatttattatagctgtactcccttttgtacttaaagctccaaatataatcactatcaatattagaggaataatacctactaaaatatttttctttattttctttcttataaacacaaccgctgtaatcaacgcaactacaactccaactaatcccgctctagaattacttccaattatattaataaaagctaatgttcctattattccagttacagctttatactttttatttttcaaacataaacacaatataaaagctagaccaacaatcatccccatatagcttccaacataatcagggttatacaacgttccataaactgtaccctttgggaaactaaagcttaaaccatctgcataagctttatactctcctggtaaaataacacgtcttccaaaatagctttgataaaagtcatgccctaatatctgagaaatgcctataatacatataataaaagcagaactcataagacttattattattattttaagacttctatcattagaaaccgaatttataactattaacaaattgagcaaataaaatattagaacaatcattccttcatatctctctaaatacccaaatagtgctatatctttatgctgtgataaaatagttgatattattataaatgctccatatataataataggaatataaaattttgtactctctaatataatctctttccttataagtttgtacaaaaaatatagcagcataactaaactaattattataaatacaatcattttatagtaggaaaaaaaatcaaaattatattgtaatcctgttaaacttcttagtaattcactatctatttttataggtttcaaaaacactaccaaaggtaccaaaaaaattactagactcaacattaatataataaatttatcataatccctaaatttcctacttgaatcaagattaactacttttccatttgtcaaaacaagttacctccatcaactcataacacctttattctcttctaattatatacaattatcttaatacaatcaatttacttacaaattacgttttgtatttttatcccttatagactataattgtactgtaaataaataatattacaggaggtttttattatatgagaaatttgtttaaaaaattctctatttttctaattattttttccatagctgctgcaagttccccagtgttattcactgcatatgcttgccctattgaggaattatcaacatgtacaagcagtactacaagttctgctataggctttattaaaaatactactggatcttctataaggatttccaatgctactaattctactaaaagaaacttacctaaaactactaccagttcatctataaacttacctaaaaatactactggttgtcctataaacttcccttggaaccctactgggtctcctataaatttcccttggaactctactgcgtctcctattaactttccttggaattctactggttgccctataaatttcccttggaactctaccgggtctccttttaattttccttgggatactaccggttctcctataaatttcccttgggataccactggggctcctattaacttcccttggaattctactgggtctcctatagattttccttggaactctactgggtctccttttaattttccttgggatactaccggttctcctataaatttcccttgggataccactggggctcctatagattttccttggaattctaccgggtctcctatagattttccttggaactctactgggtctcctattaacttcccttggaattctactgggtctcctatagattttccttggaactctactgggtctcctataaatttcccttgggatactactgggtctcctattaacttcccttggaattctactgggtctcctatagattttccttggaattctaccggttgtcctataaatttcccttgggatactactgggtctcctattaacttcccttggaattctactgggtctcctattaactttccttggaattctactgggtctcctattaactttccttgggataaaatcctcaagcatatacctaaatatattcctactttatcgccatcgaacaacatattacgcttatccccaattgacaaaattgggtttaataaaaagccccttcatttaaaattctagaaagataacaaaaataaggtaagataaatttaaaaattcatcttaccttattttaattacataaaagtcttgccaaaattctttttcattatgttagggagaaccttaaatcttaagattttccctagcatagtgaaaatctcaactaagctcgtgctccaactctttttggaatactctcctctgcaaattgttctttaaatgcccttcttatgaaatacactgatgttaaaataacaattatatcagtcaaaggatatgctataaaaacaccattaatccccacaatcttaaacaatataacagccattggaataaacattataagttctctatatatagatagtataaaacttattcttgcttcaccaattgcttgatagtaatatatcgctacataatatattcctagaagtggcaacatagatataactattctaaatgctgatacagtcttacttacaagctgagcatccttaagaaaaaatccaatcaaaggctgtgcccatattataaatcctacccaaacaaatgctgaaataattattaccgtttttaaagaaaatttcaagatatccttggccttcttatagttaccagctccaaaattataaccaactataggctgcatacctgaacttattcctataacagttataaacataaacatgtatactttcgttattactccaagcataattatggcagaatcaccaccaccagcatataatacattattaagtactgctgatacaactgcatctgcaatttctattataaaggtggaaaaccctacgagaactatctcccttataatatctccgctaattatatttgtactaatattctcaaaaaacttaaaattctgttttttattcatgtatgcaaattgaactaaggcaactacaaatgctgccagttgagataaaactgttgctataccgcttcctcttatacccatatgaagctgtataactaaaacataattaagaataatatttaatagtacacctacaatatttgtgtaaagcaaggtttttgtttttccaagtgaaaccataatataggacattacactcgcaagacacataaatatactgccaaacaatataatagatatatattgtactgccattggatacgtgttatcacttgctcctaatgaatagagtatactcgatttaaattgaaatattataaaagaaatcgaaattatggaaactatagttaaagcacatgaattgataactatcttttttagttctttataatttttttctccgataactctagctgcgtaagtagaagctccggtagctattaaaagccccattgctattaagattttttgaattggaaacgctattgtcatagctcctatagcattttcacctatatatctacctgcaaaaactgtatctaccatattataaagttcatttacaagtagtgaaaaaatcgcaggaacagcaaacctaaagagcaatttttttgagctttgtttaaggaaagccctattgtctaaagtcattttatcacccctatctttcctacaattaaattatagtatttctaaggggtgattttcatcaactaaaatgcttatatgaatgtaccaatatgttatatctcgaaaatttacaatttatgataatcacagattaaaccaattttaatgttttcatacctcttttattaaaataagaacagctccgtatcctctaagtgcagttcttatattaaatattgtgcttttcttcatgcttttaaaatagattcttggaaaggcagctttatgaagtatctctttttcctctttatttaatctcctaggcttacccatatcaacccaataattatatgaagatcctgcactttcatttatctcatacattgttatctttattgatgattttatatttactatgtttaaagacattttcttttccgttatatttttcctacctttaaacttagaaaaattactaaatacatccagtgtatctattccatcataatagctataaagcaaaatttgatactcattttcatttttagttactatatagccattacctttacttactaaagtatctcctaacttattcattagataaaatgcatagtatgaaggtttttttattcccttatcatttacaagccccggatatccaaagaacacttcatttgtaagcttaacctgcttatcgagcacatcaaaagctctcaagaaatttccacttttttcactttgtctcatacttctatgaattataaatggaagcatatatgctgtatcataaatatagtttatattgtcattgtaatgaaacatttcgtccatcactgtaagctcatagctgtctattaattgtcttagctcttctctcatgctctctttcatcgatattggaaattgaaatttaaaagaatctatatctacagtatcaatctctttaaagtattctataagggactttaatgcttttatgtattcatccttcgtaaattccctatcatctaatactataacagcaccaattcccatatcatataaaaattcaaaaacatcactagctctgttccaattacagaattcagatcctggaaatatccccatatccacactgattacatttagaagccttacatacttaaattcaatttcactttgaatcgcctcaagtatatctctattgtcttctattaaaagctcaaacgcatctccgatatctattacctctttaaattccttattaaaagtacccaaatcttctgacatattgatatatattttatcaattaaatcttcataattaaatctgtcataatcttcaagatagttatttaagctatccatactttcatcgatgttaaatgtcttaattttttttaatgcctcaaatacttcttcactaactttgtatttctttctgtactggtttggagaacaattaaattgtatcttaaaatgcttattaagatatctaacatgagaaaagccaacatcctgagaaatttcagttatagttttatctgtatccaaaagaagctttaaagcttcatctactctagttaaattaagtaaatcagtaaaactatatcctgtagtgtctttaatttcatgtgataaataatgtgtacttaaaaattcttttttagctatatcctgaagagttatattatcattgtagttattgtatatatattttgtaattctatgatacctttcaagctgttctcccttttctctaagctcttctctttctgatgttaaataatggaagttgtttattaagttatagagcaattcaacaagtatatcttctattttcttatcataatcttcttgtctttgaacaaattcacatattattctagataaatattttctaagaatatcatattcttcgcccttctgcgcgttatcatcagttatatttgtataaaagaacatattctctatatcgttaaagtatttcttaaaaaaagctggatctatgtgaaatattaacattctattatcttcatcatcactataaacgctgtgtgcttcatctatatttacaatttcaatatcgttttcaacaagctcatatttatcagaatcaattgttacattaaagttccctttaagaacatacaatatttcaattgaattatgccaatgtatcgggtaatttattacacttgcataggatattagaacaggtaaatctgaaggataatctatgtattgtcttctcaaaattaagtacctcctaagcctttttatgaaattacagttaaatctataaaactatcaattataaaaaacctatcaattgtttctcaatatatcatacacctataatttatgtcaatgtgacaataattttaaattagattcaacaaaatacattatattacattatttgtaatttttcttgactaatgaagctattttgtttatactagttagaagagtcttttaccaaattaattatctaataaataacaccatttaattatattaggtgttttatttattgtaaaattaagcataataaagttaagtatttatttatagtgattttatgtgtttggtagaactaacatgtttttaacaaattaactttctttaaacacattgaagggagcttttaaagtatgaaaaaaattatacttgcacttattatcatcagtgttatatctgcatcattatttatatataaaaataatcaacctaaaaaaactgtagtaaacgaacccaaaaagaaagtttctacacctaaaaaacaagccaagaaacccgaggtaaagaaacagaacatcctacttgtaaacaagcaaagtaaattatcaggaaactatatacctcaaaatttgagaactcctaacgttaaatttattagtagttctgatcctaatgtaaatcaaatggagagcgaagctgcaacaggacttgaaaatatgtttaatgcagcatcaaaggatggtcttacacttctagctgtttcaggttatagaccttattcgtatcagcaaaaattatataatgaaaaagtagcacgagacggaaaagccgaagctgataaatatgtagctgaacctggtacaagtgagcatcaaactggattggcaatggacttactatcaaccgaatactcttctttagatgatggatttatgaatacaaattcttataaatggcttcaacaaaattgtggtaaatatggtttcataataagatatcctaaggataaagaaaacataacaaagtataattttgagccatggcatgtaagatatatcggtcttcctgcctcacaagaaattatgaacagaggtattaccttagaagaatatttagctgaacagaatacttcaaaataaaaaatactccccaagatattaatgctttggggggtattttttatttatagttgaatgtctaaattttctctctgctttgagttttatttctttgctagcatactgctttcttggagttcatgaatataatggctacgcccaaaccccggtaggtttacacagattttttgaatatttgtaggacttcggaggcgtttactggtcttaggtttcctatggttcctcctgtaagctttactgattcctttgccattatgtccaatttttcttcttcaattccaacatctctcagtctagatggtaaacctagtacatttacaaagtaatctcttgttttttgtattgcttgatgtgctatgtcatagtgatttttttctttgtctattccccaaacatttacaccatattcaacaaacttgtacactgtatcattatttaaaatatactccatccaattaggtgttaaaattgcaagccctacgccgtgtgttatgtcgtaataagcacttaattcatgttccattaagtgtacactccaattagtgtctttaccatatgttaaaagtccatttatcgcaagacttgaagcccacattagattggctcttgcctcataatcatccggcttctcaagagctattcctccatatttaatacaagttcttaataacgcttctgccattctatcctgcaaatatgctgtttttgtattactaaaatacacctcaaatatatgactcataatatcagctgttcctgctgctgtttgattggtaggtacggtatacgtatacgttggatctaatatagaaaacttaggagccatatctggatgtgccgcaattagtttttcgtttgtatccatattatttattactgcccacgtatccatttctgatcctgttgcagcaatggttaatatactagctataggaagcaccctttttatttttgagccatctaacacaatatcccatggatttccatcatattcacatgctgctgctataacctttgcgcaatctattgcacttcctccacctatagctagtactacttcaactccattttctctacatattttaactcctttttcaactgtagttactcttggatttggctctactcctgcaagttcataaaatttaatactgtttttttcaagtatacttacagctttatcatatattccatttctctttatacttcctccaccataaactataagcactttagaaccatattttttaagctctcttccaagtacatttatcttatctttaccgaaaaaaattctagttggtattgaatattcgaaatcaaccactttaacccctcctgtttagattattatttaaataatataatgtaggaatgcttctacattatatatattttaaacctacttaaaattattacaataatatttttacgcttttatccatttgttacaaaatattaacattaggttattatttaggatttaagttagcgtaaatcagcatacatttaatcataaaatgaaaagagtgaggcgttagaacaaaattactcctcactctttaacatcttttaaattataaaaatacctctacagtttctattaataagattttttaaatatctcaagaacatcctctgcatttattggtcttaaacttcctattgttcctccagaatttctaacagcttgctttgccattagttctagtttatcttttcctattccaacttctctaagctttgaaggaatacccaatgaattaaagtattctctcgtatttttaatagcctctcgtgctatttcatagttatctttgttcttgtctattccccaaacatttattccataagaaacaaatttatgaagtgtatcgtcatttagaatatattccatccaattaggtgttaaaattgcaagtcctacaccatgtgttatatcataatatgcacttaactcgtgttccataggatgacaactccattttctatccttaccaagtgataatagaccatttatagctaaacttgaagcccacatcaaattagctctagcctcgtaatcatcagtcttctccattgctatttttccatactttatacatgttcttaagattgcttctgctataccgtcctgcacataagcaccttcaacaccactaaagtaagattcaaaggtgtgactcataatgtcagctgttcccgctgctgtttgatttttaggtactgtaaaagtatatgtaggatctaacactgaaaatttaggtctcatatcatcatgtcctactccaagcttttcattagtctccatatttgaaattactgcaatttgatccatttcagaccctgttgctgaaagagtaagtatacttgcaattggaagaactttagttattttagatggatctttaaccatgtcccatgtatcgccatcataataaactccagctgcaattaccttagaacagtctattgcacttcctccccctattgctaatactaaatccacattattttctctacatatttctatgcctttttttactgttgttatcctaggatttggctctactcctgaaagttcatagaaagctatattgttttcttttaatatagctgttgctctatcatatataccgttcctttttatacttcctccgccataaactataagcactcttgagccatatttcttaatttcttctccaattacgtctatttttccttttccaaaaaaaactttagttggtattgaataatcaaaacttagcatacttcttacctcctagtaatagatttatagtttgtctacttatattttactattttattattttaatacaagcatctaatatgaataaacaacgaaatttcatgcaaactactattatataaataaattgagggggtgaatttttcgttgtttaataaaatttttaataaagaagaagcatctaaaaataacgcgaagacggtttcaactagccttaaaacaaataaacatactatagaaaccttatttacaaattgctcagatttaacgattagagaatttaaaatagctaataatagaaatttttctgcaatgattgtctacataaataatcttatccaatctgatgtaatagaatcctctgttataaaaaaacttatagaagaagattacaataaccatccccatttaaacatatttgaatatacaaaatcaatttttgctgttaatgataaaaatgtatataaaagcatggatgatgttatattgtccattttaaaaggaagtatagcattattcctagatggtgaaagtaaagcaattattataagtattggaaaaccccctgaaagagctataacagaaccaactgttgaaactgtaataagaggtcctagagagggcttcactgaatctttaaccacaaatgtagcccttttaagaaaaaaaattagaagcactgattttaaagtggaagaacttactttaggtgagaattcaaagacaactgtagctattacctatttagctaatgtagctaaccctaaaatagtagaggagattagaagacgaataggaaaaataacgatagactccataattggtatgaattacataaaggaatacatacaggatgaagctttttctgcctttccaactgtgttctcaacagaaaggcctgatgttgttgccggaaagatttttgaaggaaaaatagctatactagctgatggtacacctattgtatgcactgctcctgcaatattttttgaatttcttgagacaaatgaagatttttttataaattttattcctgcaaccattaatcgctggattagatatacatcgttacttatatccatacttttaccaggcttatatgttgctataaccacttttcatcaagaattaatacaaacgccattactcataacttttattcaaactcacgcatctgtgccttaccctacttctacagagacctttttccttttagttgcatatcagataatgatagaggctggtattagaatgccacgggctgtagggcaatccataagcatcattggagcactaattatagggcaatcagccgtagaagctggtttaataagtacacccgtaattattgtcgttgcaattacttatattgcctcttttgctgttccagtcaatgaaatgcacaacgccttaactttgccaagatttatattcatggttttaggaactactctaggtctatttggtttaacctgcggttatcttgttctatcattaaaattaatttcaatccgctcttttggagttccctacgcaacacctatagctcctacttctaaagaaaaccttcttgacattgttattaggaaacctttgtgggcaaagctaaagcgttctccaaaggtttctgataagaactcaaccaaaagacagactagaggccatcttaaccttgccataaaagatattagaaaggctattgataaaattaaaaaatctcactaaggaaagggttgaattaaattggaaaaaaagatatgctcaaaacaaatgttttcactaattgtcctgtgtgtgcttggcagttccataatatttttcctaaatccagaggctgagcaaaatgcatggataggcgtactcatgtgcataataccagctcttatatttcaatctacatatatatatttgtggcaaaaccataaggatgacagtataattcagtatatgccaaaaatatggggaaaatttctaggaagtatttttagctttttttatttaactttctttatatatactgcctcaagggttttaagaaacttatctgtattaataatcacatcttcaatgcctagaatgccaatttttttaatttgcatgattttgatgtttgtatgttggtatggtgtgtatttaggaattgaaaacatatctcgtttgatgtatgtatttttatttgcttggataagcttttttgcctttgagtggatattttttattattcctccaaaccaaattgaacctaagcatatgtttccaatacttgaaaatggaattgttcctgttataaaaaaaagtctttctgttatagcttttccttttggtgaaaacataatatccacgatgctttttccccttgtgtctgaccagaaaaaattaaaaaaatatgcattatctgcagtcatagtgcaaggtattcttatttccctaagtacccttctttgtatattagtacttggacttaagttttcaatttcagccttatttccttttttgcaaaccttgcgtgtcttaaaagtcactgaatactttgacaggttggatatatttgccattataattgtggttattgtaagttttacaaaagtaagtgttttctgttatggtgctgttaaaggaactgctcaactatttaaaataaaaaactccaaatggctttcaattccaatttcaatattaatcttaatcatatcaaggttaatggcatcaaactttccacagcacatacatatacatatagatatttttataaagtacttaaatgttccacttacaatcattctcccccttttaacaattatattatttaatctaaaaaaactaaaaaaggagaataagtcatgagaaagctcatttcaatatttttgatattatgtacttttttattatgtggttgcagtgatgttaagcatgaattaaatagattgtctctagtactttgcagtggtatagatttaagtgaagatggcagatatatatacaccgttgagatattaaatgttggagcttcttctcctcaatcttctggtaagcaaggtgcatcacccagcataaatgtatttagcagcgaagggcataccataacagaagcctttaataatgcctctgtactctctggagagccgctatttttcgcacacagcaggatggttgttgtaggtgaaaggttagctaaatacggtttaagtgacatgatggataaactttttagacactatacaataagacctgacggcttaatatttgtaacaaaaggtaacgcaagagacatagtgtctacctatacaccagaccagccccttcccgctgaaaagctgagaactatgtctatgctgcaagaaatgactggatattcaatctcctattcaagattagaccttgtaaaagcattaaccagtaaatcacatgccggcgcaattggacttatatctcttaggcctgatcaaaaattttctaatagatttaatatgtatggagcaggcgtttttaaaaaagataaattagttggatacttagacacttatgaaacaagggggctacaatgggtaactggacatatctcaagcggttcaatactagttcctcttccagacggcaaaagaattgtgtttgatataatagattcaaaatcaaaaattaaaaccaaagttaatggtaacaaattgactatggaaataaatgtagctgaagagagcttaatatcagaaaccaatgataaaactaacgtaatgaaacactataaagagatgaataaactagctaagcttgaaagcgaagctattaaaaaagaggtcagctctgccttagctgcctcacaagatagactgaaaaccgatatatttggttttggcagcgagatttacagagataacccaaaatattggaaaaccgttgaaaacaattgggataatatttttcctaatgtaaatgttaaaattaatgtaaagtgtattgtaagaagacccggtctaacatctcagcctataatttagataaccttacttaaataattcaattatttcattttcatctaaaccagaaaatacttcgcttgtagataaatcctctgaaagaagactgtctacaagcctcttcttttcctcctgcaaacgtatgatcttttcttcaatagttccctttgccacaagctttataacctctactatatttttctgccctattctgtgcgctctatctgttgcttgttcttctactgccggattccaccatggatcaaaatgaatgacaacatccgcagaggttagattaagacctgttcctcctgcctttaaacttattagaaaaacagagttatttccctcattaaagtcctgaaccatattcatcctattcttagaatttatacttccatctaaatagctgtattttattttctcttctctaaatctttcagctatattctttaacacagaagtgaactgagaaaatactaatattttatgcccctcatcaatgctgtgatttaatagctctataagtgcgtttattttagcacttcctcctgtatagtcctccattacaacagatggatcaaggcaaatttgcctaagtcttgttatatatgaaagtatctcaattttacttttattgaactcgtcatactctacccttttttcaattaaactaacagcatactttgcataggtgctgtaaactttcttctgcttactttccatatcaactgcaactatcttttctattttattaggaagctccttaacaacttcctttttctttcttcttaaaataaatggctttataagtctattaagatcctcaatcaccgcaggttcctctttaagctttttataatatcttacactaaatctatcctcatcataaaggtattcaggcattataaaatcaaatatagaccacagttccataacagaattctccataggagttcctgaaagtgcaaatctattaactgcatttatcttctttacacttatagcattttgagaatgaggattttttatattttgagcctcatctagtatacaataatcaaattctaaggccatatatgaagataagtccctctttaaaaggttataggtagttattataacttgaaattcatttaaattttcaattataacttccctttctttttttgttccaactgatgctgctactttaatacttggagcaaatctttcaaactcctgtatccaattatataccaaggaagtaggtaccactattaatgactttttgcctgggctagatagcaaaaacgaaatgacttgaaaggttttaccaagtcccatttcatctccaagtattcctccgaaaccaaagtaatccaaagttttaagccaattgtatccctttttttgatattctcttggatgcccctttaaagtcctaggcagctcaaattctaagctcttttcctccttaaatttctcccttatcttcttaagctcctcttgaccttttatgtatctaatgcccttttcctctaggtattcatctacataaatacttttacttttaggtatcttaatgttattttcatctaactttttaggagaaatggaatctaataactttaagaaattcttaagctgaagttcttctaaatcaataaattctccattcttaagcttatagtatttaagattatctctaaatgccctgagtatcataactgtttcccctggtggtatatcatcaatcttaaatttcatttcaaaataattgtattttcccgtttttatatgcccgcttattcccttgctgctaatatgctttatacctttaaagttttccgaataaaatacttctccaattttctgaagtcttactatttctgtcttgaaaaaggtaaaggcatagtcatctccaaaaccaagcaggaatttatttttaattctctcaaatctaagggctcttacagtttctaaaacttcaatttctctttttgaatctctgtaaatcactttctcattaaaatcctcgaagatattaaattcaaaagctccatacttaactttaacagtaagtatagtatttccatcttcattatcaaagtaaaatttaaactcacacttagctactactattttatctgttatattggaagacagtgatatactattagatagtctttttaaatccggaactaatttccttagaatagtctcttctttttctccagataatctaacttcttccgctttattaaacacctcgaaatacggccctattttttcacagtactcataatctggaatatatattcccagtccatataaaaaaacattatttttagaacttaaggatattggcattccagaaggcacacttaaaacataatcgtcctctacatccctaaggctaatttcaattggaggtttttcctctataatttctacatctgtgcttaaatcaaaaccttcatttaaataaaccctatgattctttataacctgaaaaaattctctaacaagatagtcaggcacatagacgtactttccatctataaaagatttcttaatctttctattgtaagagaatggcttatctatattaataatcatctggataaaatctacaagctttttatccttaacacttagtttttgttccttcatattcaatataagctttttaccatagggtattgggatgttttgatatatgcctaaaagaaaactatttatatcttttaacacataaagattatttgaagtcatagttttaagtcctattttaagttcaaaataaattctattatcccatctatctttatttatataaacctctatttttagctcctcttttgaactatcccctccaaggagaatatccaaggtatccttaatgcctaaaagtttattaagcttacgcttttcagctttttttaatcttgtatttttagaaagctcctccagcgaactataaaaggttgctattaaatgcttacagcagtaatttttctttgctgcattcttctcataatcagcacaactacaataagtccctactatactcttatcagttgggtccatttgtatttccgtactgtactgactaaaaagactttcagatataacattaccctttatacatatactatcttcatcatctttaatatctactgaagaaactaagtcattttcaaatactctctgtccttttgattggttttttcccgcaacgctttcattaaatatctgaagcaattcatttttatccatgctattatctcctaattactataaaagaatatatatatcatagaatatttagtatataaaatcaataaaaaaagagcacctaaaagtgcctttacaagaaaccatcgacgttatgtttcctttaaaacaaacagggtttgattctgaataagtcttacggttatatgcattaccatcttctgctttattctttgcatgttttttgctgcatctatcttatctaccatattcaattcttcaaatttagcatgaactaattcacaacaaacctcttcctcttctttatagctttctatcagcgttatttcattatttttatcaactatttttaaatttctatttttaccactaagaattggctgaactatatattttactcttgtcacacatctaaagggtacattaatcgtcatattctttacttcaccacttatagaatcgtcgcacctatccttttccttagtatattgaatactttttattactgtcccatttaaaaaaagtttatttgtttcaggaattaatctacaactctcaagccttactcttctttttatgccatctatatgcacaataggtcgttctagacttacaatattctccaaatcgatattcaccacaacttcggttattataactggcatacgtacaggaatgaatccagccttaatactaaatttcactagatcactattacactctgtaagtatcctcacagaaatattttcttcttccttttgctgaggctcttctttatttatttccacaatctcttctttatcttcttctatcttttctactttatgtccatgatggcgatgttttctatgcctacgcaacctaattcactctccgaatcttgctaatatatgttgtaagaggatcagctctcagtctgaccccctaatttaactactttttatatttgtcaatcattccattccattcgccttttcctttgtagccatattccttgccaaactcttcttttttgaagccctctttactaaatccttccttgccacaaccttgattttcaaagccttggttctcaaagccttcttttttgtaaccttctttttcaaagccttctttttcaaagccttctttttcatcataatgtccatgatgagtgtgtcctacttgttgtttttgaagtaattttattgcaatataaacaactgacttatcagtgaattcttggaactcttcttcatttaagaagtgatctattgggcatcctctatcatcaatatctgcatcatatatctcagaccattcaagttcacaatatacaggttcattaaatatttcatagcttgctctatcagcttctcttatatttttacccattctcttttgatcaaaatatctagctacatctggctgaaaattagggaacactctagggcgagctccattaaattccactcttgtaacgcatctaaatggaatatgaactgtagtatcattgataacaccgcctatacctgattttgtagtacagtgtcttgaagcatattctatattctttcttatatagccctcaatgaataccttgtcagttcctccaacatatctgcattcagtaaggaatacttgtttctcaattctctttatttcataagcaggttcatttaatttaaccttagcttctacatctatttgaataacaaactctgaaagaacaacaggtactttatactttccaggtcttacaggccagttttctgcctgctcaagtgtatgagcctttaaaaccgatgcattacaaaatgaagttgggcatgaagttccttgattattttccatttgtatctcttctcctttaccataacatgggatattttacaccctgatatatagtattctgctaagataaaaaatgtactatgctaacccaattttttttactttaagcctatatattaaactacttttgtgtaaaataagagccctgaaagctaaacctttcagggctctattatattatattgcatactcttaaactaattatttggcagcctgagctgcttgtaacacttcatcatagttaggatatcctgatacctcttctagataattggcatatgtgactttattgctgctatctactacaaaaacagctcttgctaaaagtcctaactctttaatataggtaccagtatttttaccaaaggctctatctctataatcagataatgttgttacattcttaattccttcagctccgcaccatcttgattgtgcaaaaggtaaatccattgaaatagtataaattgaaactccatctatttctgatgctcttgcattaaaggtctttacttcaagatcacatacaggcgtatcaacagatggaactgccaaaaatactcttactctatttgtattctttaacatcactggctcaagagaactatttaccgcaacaaaatctggaaatgtatctccaacctttatttctgttccttctaatgtaacttcttttcccttaaattttactttcatagcatactgtttattttatttaaaataatatataaggaaattaacgactagaattttgctatatatcaggggggatatcaatcacaatatagtgttaatttcctcatataagttgcatttaaataaataaactactcacctctcttatataatatttattattaagtaatatctattatatattactataatactacctaaaacctaaattgtaaatatattattgcattacttttgcaaaatatatatcattttattatttacaacttcaaatttttttatatacagtactattaatttttttgcttcagatacatatccatagtttgaatataattctgccaattctaaatatccaccatcatatttagaaatagtttgaatgagtttttttaggcatttaatttctttagttgctaacagtatatctattatttcaaaaatacatgaataatattcctcgtcattttcatgtggagttatacctctaatatccaaagctgcattgtaaaagtttatatatgcctttagcttatttttgttatataagctaagctttttgtaatcaaattcatctattattttccacgctaacctatattcttcaagcagtacacagcaaataaccttatacattctgatcttaaaaaagtataaataactttgagaaaaattatctatataatctttgcacttatcatactgttttaattttaataagcattttattttaattagttcaaggtcacgtgtcacttcatcctccttaagacacgtatctataattttgagagcaacttcataattgccctcaaaacaaaatatatctgctaacaacgaattatgaatcttaacttttccagctttctttaaaatttcgtttattggagtatttgataataacaatattctaaccattaaataataggcctcaatatagttggatttactaattgcctccttacaatacttataggcttcttcataatctttaaagtaagcatatatcttggctaactctaaagaagctttactccctaccttctcttcaagctttcttgcttcttcaaagcacttcactgcaggccccataaaattttttcttttgtacataattcccttctcgtaatacgatagaggcatatatatcacctcaatatatctaaaatctcattatcaaatacctcaaattcctttatagatcttattgcctctttttttgccatactttcaatgccatgtttataatatagctttgaaagattcagtagtacattttcatcacttattaaattaaacaaattaagagctttttcaaactcatcatataatttattcgaaagtagaatatcgcaaatatccaatataaaacctgtatattctttatcttccttgtcctcggataaaacttttgtttcttcattcataaatagttttacaaattgagaatatacttcaagctcctttttatcctgccttttaagcttaccatctttaaatatctctagatctttaagcgcctctttaaattttcctatcaaaactaagctcaaaaccttatacatagaagcattaaaataaaatacactttcttttgcaaaataattagcttctgcacattcattaaatttttgagctctaatcatagccttaagctttaagtctaatattgcatctgaattaagtccttctttttcacatttgtccgtatattcaagtgcctcattaaaatatccctcatcataaagaatatttgctataaaaaaatatgctttggggtaatcagaaaatagcttttctaattcaactttaaattcttctattggcgtctttctttcctttaatatatgtcctataacatatacaggatttacaaagtcattcttagcctttatggtttcaatacaatatttatatgcttcttcataatccttcaaacccatatatatattaacaagttcatataaagctttaaaactccatgtcccataatatagctttaaatttgagggaggttctcccatctcaatacatcttttaagagcctttattgcaagcgttggacgtctagtagcttcatatataagtgcttttaaaaaatatatatctgttgcattaggataatattcaagccctatatctgcaaactctattgctttttcatgtttaccaataccaaagtttgtaactattaaccttgtgattagtacaaatccaaaaccagaacttggattaaaatctttataagcttcacagtaatgagttaatgctttttgtaaatcacctatagcataatactcgtttccaatattaaaatgagcaaatctatcgtctggattttccttaagctgtttctttaaaagaggtatgtttcttcctcttttattcttctttttagatacatcctccaaatatccgtaatgatatattcttatattataaattacattctttatttctttttcagtattaatcaactgattgtgaacaataccttcgtacttatatccataattatttttaaagagtctcggattcaaattaacacttatattactactatctacaaattctccacaatagctcaaggtttcaaagtaataaagacaatcttcttttaaattattcttcacaagctctttgaatttttctttgtcatccttagagaattcatcatccccatccattatgaatatccaatccttagttgcatatttaagggactcgtttcttgcatcgctaaagctattgttccacataaaataatgaatctcagctccaaactttttagctatctcaaccgttttatcagtagagcccgtatcaactataattatttcatcaacgatgtccttaacactatccaggcattgaaataagtatttttcttcatttttcactatcatacacaaacttatttcattactcataaaatcactccaaaatatatgacaggtgacaaacctaaattgcacataccatggtttgccacctgaaatttttaatttaaaaattcagcctaaaatcaacttatgcatatcttatacataagttgataatcttagctacactaaattagtttttagcatcaaaaacaacttgtaccgttggaattgttgtactactagaaatcaaattaactgcagcatattttagatattgagttctatctaaaactaatgcttttgttatatctgaagttatagttcctactggtaaatcaatatacggagtatacactgccctatttgtgcttggtacaagagctattctagctgttaaagttgcaggtacatttgaaattttcttaatataccatccggtagctgaatattgagatatatctataaaattggtgtaagtgcctgtagatgaaactgctatatcttgaacagtagcatatactccacttccaactattctactattgacatctcctgatatagttcctaatactccgagtcttgttaatgttcccactgctgctaatctattaactgtacccagtattcccaatcttgctattgttcctactgtgtttactgcgttaactgttcctaatactccgagtcttgttattgttgctactcctgctactctattaactgtgcccagtattcccaatcttgctattgttcctactgtgcttactgcgttaactgttcctaatactccaagtcttgttattgttgctactcctgctactctattaactgtgcccagtactcccaatcttgctattgttcctactgtgcttactgcgttaactgttcctaatactccgagccttgttattgttgctactcctgctactctattaactgtgcccagtactcctaaccttgctactgttcctactgcgttaactgttcctaatactccaagtcttgttattgttgctactcctgctactctattaactgtgcccagtactcctaaccttgctactgttcctactgcgttaactgttcctaatactccgagtcttgttattgttgctactcctgctactctattaactgttcccagtactcctaaccttcctactgttcctactgcgttaactgttcctaatactccaagtcttgttattgttgctactcctgctactctattaactgtgcccagtactcctaaccttgctactgttcctactgcgttaactgttcctaatactccaagtcttgttattgttgctactcctgccactctattaactgtgcccagtactcctaaccttgctactgttcctactgcgttaaccgttcccaatactccgagtcttgttattgttgctactcctgccactctattaactgtgcccagtactcctaaccttcctactgttcctactgcgttaactgttcctaatactccaagtcttgttattgttgctactcctgctactctattaactgtgcccagtactcctaaccttcctactgttcctactgcgcttactgcgttaactgttcctaatactccaagtcttgttattgttgctactcctgctactctattaactgttcccagtactcctaaccttcctactgttcctactgcgttaactgttcctaatactccgagtcttgttattgttgctactcctgctactctattaactgtgcccagtactcccaatcttgttactgttcctactgcgttaactgttcctaatactccgagtcttgttattgttcccactgcattgattgttcctacatttatttgaagttctcctgtactattaactttaacaggttgataattagttccatcatatccatatatagctgatcttagttgacttgctgcattttgaaatactatactatttgccaaagtttttcactccccattgtttatcaaaaattccatataaaagttagacttatacagtagatgtataagttctaaccaaaatggattttatcttcttagatttaaatattaagctacagttatattatatggtggacaaccaatttagtgatggtttttacaaaagctcgatattgctcctatccttcaaattcttcgttgcatttctaacatcaaaaataaagtttgaattttgttgtataaacttgtaatcatacttgctgtgatctgtagttatgataaccaaatcaaaatccataagcttgctcttacttatatcaattccgtaatgttctttatttttatacttataaactgaaatatgaggatcataaaaagacacctttgctccttctaattcaaaattttctattatcctaattgcaggactttccctataatcatctatatcctttttgtaggctataccaagtatcaatattttagaatctttcaagggtttattaaatctattcagtatctttgtagctctttctacaacatacatactcatacaattgtttatttctccagaggtttctataagacgtgtatggtaattatattctcttgctttccaagttaaataatagggatcaagaggaatacaatgcccaccaagtccgggacctggataaaatgcctgaaaaccatatggcttagttttagcagcttctataacttcccatatatctatattcatcttattgcatatgatagccatctcatttataagacctatatttatatttctatacgtgttttcaaggattttttccatctctgcaatctttggacttgaaacttcatgcacttttacctctaatatattttcataaaaagctgctgctatttttgtactctctttttgcactcctcctacaaccttgggtatattctcagttttatacttaacattccctggatcaactctttcaggagaaaatgccaaatagaaatctctcccacacttaagtccagactccttttgaagtgtaggaagtataagctcctctgttgtacctggataggttgtactttcaagtactactaacattcccttattaagatattttccaactacctctgtagaatttctaacatagcttatatcaggctgttgatacttatctaatggggttggtacgcatatcaaaacgatatccgtactctttataaattcaaagttaaaggttgctttaagtttgtcctttttaacaacttcttttaacgtatcatttgggatatcatttatatagttttgtccattatttatcatatcaactttcttactttgaacatcaaaccctacaaccttataccctttaactgcactttgaactgcaagtggaagccctacatatcctagaccaattactcccacaacagctgttttattctttattttttgcgctaaactttcctgtttcaatataaccacttccaaaattttaatataacggactgcgctctatacataatatgttttaaagagaattttgttatttcataaaaactggatcttatataaaaatcaaaatgccctccttataataaacagctaaaatattgaagctgtttacataaagatggcattttaaatataaatactactcttaaagagttattataaaaattttctaagtttactaaattcacttggaagctccgctatattttcctttagcacctctttaatgaaatcctcttctgaaatttcttttgaaaggcattttacaattaattttgaatattcgtatccacagccattaattttttctactaatttccccctatctaaaatggtttgttttgcatccttaaagctaactatattgttcttaacacaataatatcccgaaactgtaagagatataagttgaagtaaaatgctgcgcttgtctttctctatctgttttacctttctaaaataagcatattcttcggttatcttaacttttttatttaaagccttggaaaaaactctagagagcataatataatccaaagcaccctcaaatgcttcgtttgtagaattatttaaaatttctttagttctataaatactccctaaattcatacaggacatttcccctgttgtaaaaaatgttttcaatacatatgctgcaggagcatccttataaaaatttctatcatagtaattaaatatttgattcttatcatttaaattaaaaacataccttggagcaaccataacataatccttgttaagataatttagcgtattttcattaaattcatccatataaggaagaataatatcaccttcattagcaataattgtgttctccgtatttattttagcttcatgtaaatttcttttagtaattagggttaacgtctttatatctttaaacttgtttccaccttttaaatttactttttttaaataatcagaaatatttttagaactatcctcttctattaataactgattaaaaagctttaatattttgtctttttcagtgtttcttgaaaatccgttttctatataacttctatattctcttgaattatattctttatccttaaccattttagtacattcatctatactgctccacacatattttttaggataaatagttttagcccctacaaaattatgaattaaaggctttatacctttactcatagcttgcataacacttacattttgagattcaagcaaactagtacagagtatataatttttatcatttagccaagaatccaagttcttttgccaccctgaataaattactctattttgaagtcccatttcacttatcatctgattaaaatataatacatatctttcctcttgaaattctccagctatatacaatttatatctagaatctatatccgctattgctttaaaggcatgcatcaatagcattggtcctttcttgaaatttatatatccaacataggctacgttaaaaccactgcctctgtccgcatatttaaacttttctaaatctattccattacttataatttcagtctttagcttatctaaattcttaaccttattaagtactatatctcttaagtgttctgatacaaatattattttatttacgttctcccatttaacatcatatatataacctgtaaaggcctcataactgtgaagccttactataatctttttaaaacttgccattttaagctttgatgcatatcctataagttcatcacaccattcgaaccaacatatatctgctgagctcatttcctcattaatttgtttgtaatccagtactattatcttttttacctcatactgatccctaagtccctctattatatctttaagaaagttatcaagcccctgctttacaaaaaaagctatttttttctttttcatataccttctcctattaaacttactaagctacacatacacactaattacttaaagcttgaaattcagaaatatgtatagcttaaactttccctttaaaatccactcaacttcagcttaccatatatgcttcttttaacatttttaagttttactattttttctccataaaacttacttccattttcatcaaggcttataaccttatatcccatattctcatagaatttttctacaggtttattttttttagatgcattgtaatatgtgaatattttttcaaaacctgagcttctataaaaatcttctacaaagcttataagctgttcctcaatttttcttcccattactctacagctcattaaaaatgtatctacaaaaatctccttaagatttttcctttcaactattattactgaaactactccattatctccaaatttatcttttacttccactgcaaacacatcaaaacttttattcttaattaaacttgaaacatccgttcttgtatatcttttatttgtcaaattaaattgattggttctttgtgttaattgtgaaattcttaaaatatcatgccctgaagcctttctaactgttatctccattctaagattcttcaggaaggcttctaaggattctgtttcttttttttcaatttccctttccagattttccttgtacatttctgttctatttaaatcctctgtgctggtttcaacaattctgaaatacctattatatatatctataataaagtcctccagcatatatgtgtcctctggaaaatcaggcactatgattccctcaacattgttcttaacaagctctctttctataggactatcgtctataaacaccaaagaatctgcacccaaattaagttctgaacaaattttttttatattttccacttttgatagccagtttattttggtacatgtaaaatcactcttttttagtaccatatgtggatgcttaaaaaaaacctcatctacatccttttcattatttttagagcaaatacacaataacactcctgtatctttaatttcttttattcttttttgaaattccttatatctagctccctctttatattctgaaagctcaataccatcaactccgacttctgcaataattcctccccacagagtattatccaagtctaaaacaaggcatttctttcttcttccactcatagctacagctaagctctctatttcagctttaattatttcttctccctttactgaaaactttattccactcaaataccaaagcttattacaatagcaactttttcttccctcaacctctataagtctttttagtggaaatatagacatattgctatatttatttttaagttcacttagcctatttaaccactctaattgaattatagtttcttcctcacagtctttttcaactttaatttttttcgtttcaatatctatatccgaaataaaaaatcttatatctttattttttacaactgcctgttctatatattctagattcctaagaagttcattttttttgtcttcaatgtcccataattctttatttcgtatgagttcctttccatccaaaatcaaaaaaataccctcaggtttaaatttgtatagagctgattttatgtctgtaatttcttgaacccatactccataaccatcgggtttatatacctcaaagctatcatctatttttccagctatagatgatatattaacattggaaagaatacctattttcatctctcatcacttcttataaacttgataaagtctttaatcttatctatgctaaagacttctttcataggaatgtttatattaaattctttttcaactgccagtataatctgaagatgacaaagagaatcccatttgggaagacttttcctcgaagatgtaagcgataacctctctttcttctcctttaaagtccttgatacaacctttatcaatctttgttccatagcttacctccgtttattctatatttctatacttttaagatgttaggccttatactgttttacaaaacacagctcatccttatataagtgttttttcctatggatgtatgtcccgatattttactcatatccaaaataaaagtttcatcatatattttctacaaacgtgagatacacttactacagaatcaagcattccaccctttaccatataagtgttttcacctttaaatactgactttctataagtaataagtacattaaaagaagcttactgttagaatttttacaaacaaagccgttatgttcagctattacttttttccataattatcgtaagtcattatcctactgcatcctaaaatttatgctgttcctacacttacgttatctactattacattgtaatcacttataataactgttttactctatagcttctttagatattctacttaagaacctcttcgacttaattctgctataagcatattttctcctactacatgcatccaattaatataatattcaacgaaaattctaatgttacaaaagtacatgtaggcttatataaaggaattaatatattcataatatagattttataatggacgcttgaaggaaatgtttaatcttgatatttacattttgaaacctttctaagatatgtttgcgtagaagatttttggctataataataagatttaaaaataattctgttggaatcgtagagggtagtgcctgtgtttttttctaaaaatctaaaagaaacactagacatattctgagaaaatggaactgtttgtataggagggttaggtataaattatactgatgtacggatacttaatgacattaaaagagcctcaaatatatttattgaaatgtataagttgcactttactagtctttatgtagaattttctttcaaaaacttttcgaccttagatttaaaggattttgtttcaaacaagtgatatttttcacttatttgaaaccttccttaccttattaaaaaaacttaactctgctatctattggtataaagtctttgtctcctggatctgctgttggttttccaaaaggcatttgtcctataagtttccaattctgaggaatatgccattcatctcttacagcatcatcaataagtggattataatgctgaagtgaggctccaagaccttctagcgaaagagcattccaaatatttatttgaagcattcctgatgattgctctgaccaaacaggaaaattatccttatacaattggaattgatcttgaagactttttataacattttgatcttcaaaataaagtattgttccatatccgctcttaaaggaattaattttttcttctgtacttgaaaaatttccttctggaactatttttctaagagtttccttagttatttcccaaagcttatcatgattttttccaaataaaacaactactctagagctttgtgaattaaaagatgatggagtctccttaactaaaagctctactatttcctttattctttcatctgaaattgggctttccttaccaattccataaatagttcttcttttcttaactgcttcataaaaatcctttgacattactatcacctcattttaatttttctttaagatatataaaatatgcaattatttttctttacctaataacttttagtaagtaattttatataataatatttacctttaattacatagtacacttattaataataaaaatcaagtaatatttgttttcatttatatatatattatgctaaaaaaatataaaaaaatgcagaaaattactttctgcatttttttacttatttcatcaaacttgcaacgtcatttgcaaactgtactggatcctctataggaagaccttctattaaaagagcctcattatataaaagacttgcatatttctttaatttatctttatcatccttaaatgctgccttaatggaattaaacatttcatggtttgtgttgatctcaagtattttttcagccttaacattattgttatctggcatcattttaagtactttttccatttcaatagataactctccatcatttgaaagacaaactgggtgtgattttaatctacttgaagctcttacttccttaacttttccatctaaaacttctttcatgaaatcaaataaatctttattctcctctgtttcctttttactctctttttcatccgcttcaaaacctaaatccttgtttgaaacagatttaaattctttttccttatatttcattaacatttttattgcaaattcatctacatcatctgtgaaatataatatttcatatcctttgtctttaaccacttcagtttgaggaagtttttcaattttttcattactttcacctgctgcatagtagatgtatttctgatcttccttcattcttgaaacatattcatcaagggttactagctttttctctgttgatgaatagaacataagtaaatcttgaagtacttctttattacttccaaaatcagaataaactccatattttaactgtctaccaaagctattaaagaatttaacatagttttcacgatcattcttagccattgataacaattcacttttaattttttcttttatcttctttgcaataaacttaagctgtctatcgtgttgaagaagctctcttgatatgtttaaagataaatctggagaatcaactaaaccttgaacaaagctaaagtaatcaggaagtaaatctccacatttttgcattatcattactccatttgagtaaagctctaagcccttttcaaattcctttgtatagaaatcataaggtgcacttgcaggaataaataaaagagtattgtagcttactactccctctacattagagtggattgtcttaagaggtttttcaaatccaaagtgcttatccatatagaagttatcgtagtcttcctgcttcaattcatttttgttctttctccatataggaaccatactatttaaagtttcatcttctaaatattcttctgtttccttgtcattatcttttttaggtcttgtttttttagtcatcatcttaattggatattttataaaatcagagtattttttaatgagtgatcttagtttatactcatctaaaaattcatcatatttttcatcatcggtattttcttttatctttaatactatttcagttccaggtgtctctttttcgcatttttcaatagtatatccttctactccctttgattcccatttatatgcttcctcagaatcaaccgaacggcttattacagtaacatcatcagccaccataaatgctgaatagaaaccaactccaaattgccctattatatccactccttcctttgcttcattctcacttttgaaagcaaaagaaccacttttagcaatagtacctagattgttttctaaatcatcctttgtcatacctattcctgtgtcagtgattgttagagttttattttctttatctgctgaaattcttatataaaaatcatctttattgaaagtaatatttgtatcaacgagtgaacgataatagcacttatcgatagcatcacttgcgttcgatataagttcccttaaaaatatttctttatttgtataaattgagttaatcattaaatcgagaagtcttttagattcagctttaaactgttttacagccattttatcataccccttcacttgattaatatttaaatgcccaaaagaccaaataccttatggtcattggctcaatatcactatgtattttgttagcactctatatcaacgagtgctaattttattttagcaataattacagttttgtcaatacgtttttccatatttaatcaattaactttcttacatcaaaggtgcaaaaactcttagaaccacgcgccataaagtactataccacttaactttgttaatctcttctaaagttatctctttacttttatctaatgtatccataaaatccttcttaatatcgtatacagtattggttttatacatccaaacaccgcactcaaaatgaagataaagacttctaaaatccatatttatactgcctacaactccgtattcattatcacaaacataagtttttgaatgtatgaagcctggcatatactcataaattttaactccgctctcaattaaaactttatagtaggatttagttacagaatgaacaatttttttgtctggtatgtgtggggtaataattctaacatctactcctccctttgcggcagaggtcagtgctgttaccatctcgtttcctataactaaataaggtgtagtaatataaacatattttgtagccttacttatcaagttcatatatataatttccccaacaggttctccgtctaatgggctatccgcaaatggctgaacatatccctctctagaagaaaattctttttcaatattctttttgaatgtattaaagtcctcatctattcctctaagaaagctccacatagataaaaacataactgataaattccaagctgcttttccttccactttaattgcagtatccttccaatagccatacttttgatatttatttatgtactcatccgatagatttattccaccagtaaatcctaccaaaccatcaattactgcaattttcctatgatctctattattaaatttaaaagataccataggaatgagaggattgaatacgcagcatttaatgccaattttctcaagttctttatgatatccgttaggcagagtaaacatacaccctatgtcatcatatataactctgacctccactccttcttgtaccttatctcttaatatttgtaaaacactattccacataactccttctttaataataaagtattcaaggaaaatatattgttttgcttttttaagttgttctataagttcgttaaatgtttcttctcctgttgaaaaatattctgcctttgtgtatttatatggaggaaaaagagaataattttgaatataacttgattgattcgctgctgtttcattattattccttatctcatttattatcacttcaccctttatcaataccgctcttgacttagctactatacactccatcttttttctagttcttctgcttaacttacttccgccaaaaaataaataaaataatcccccaaaaagaggaaatactaatattggaataatccacacaattttatatgctggattactattattgtaaagtatatacaatactgcaattatgcttactacaatgctaattccataaaagaacacaaaatactcgttaaattttataattacaaaaatcaaaacaaatagctgtattaatgctgaaataactacaaaggtagctctatgaaatataaattttataaaaaatctcaattattcatctccccattactatagtccttttgcagtatttatatcagtcttattatatgattatatgtaaactcttattaacacttaaataatttcttttataagattttaagcctaaatcaaaaataaagagtcttgcgactccttatttttaatccaatatttcatttgatttagctactacctctgataattgctgagcagatggatcataaggtttcgtccaacccttatttactgacaattcgttaattgctgcattacttcctataagctgattaaggcttgatgagtaaactgctcttaactctggtgtcgtgcttataagtgttgcatttaaataagcacctgcagaacttttagcaccatccatcataactccagctataacttgatcatctatatctgtgtttccttttactatacttcctaaaatagtcgacatgctactttccccctttaccttataacactattttcgtttataaattgttgtaagccttttattctgccctctgcttctagtattcctgcctctgcttgtttctttaaatcctcatcttttataattgattccatagccctagaaactgctaaaccatcattttctgcttttaacaatcctgataaagaaagcatttctgcctcagaaagtcttctcattttcaatcctcccttctaataatatctttactaatccgagttagtatatgtagttatctatatattaaacttcctatttcataataaatatgaagttgaaacatcagacttttatgatatcgttaaacacaaatggttatattttaatgtaattatattttttgtatatttatctatacttttacttaaaaaaggagtaaaattatgtaataagatatattatataataataacttgtgtggggtgatatagactgtggaaaacttttcagataaagatgaattaatacacaaatgggatagctttattggtactgtagaaaaaaatcctacactcagaccattaactatggaatcatggaaaaggtgcaaaaatatgggcgtcaatcctaaacatattaaattaaaaactctttctcataatgagctaaatgataaaatttcaaacaatcttcatttaataaaaattgtaaaaccttattttgattatttattcttacgtgttactaacataccatttttaattgccttagcagatagcaaagcttggattattaacatcagcggtaatgtaaatgatttcggagaaaaaaaatttagattttgccttggttctaattgttctgaaaaatatattggtaataatggaataggtacttgtcttacttgcggtaaaccaataataatatacggaagagaacactttgttaatgcttatgcttcttttacctgcataggtgtgcctattaaagtaaataagaaaattgttggagctatagacgtatgcataccaaataagtatgcacatccatctatatttgaccttactatatcatgtgtggagtctattcaaagcactctttcaattattgaccgtagttctattaaaaactcacctaatatgaatctatcgagaacttcaaagcttctagcaactgcagttcatgacctaaagaatccattatcagtaataagaggattaggacaactaggtaaactaacctctgataaagctaaggcagattattattttgataaagtaataaaacaagctgatgaactaaatactatggttgtggaacttctaagcatatttagtcctccaaaaatcaaaccgatggaaatatctaaaattattaaagatgttatagaagaatttgagccacaatgtaactccaaaaaaatatccttaaacattataaatagtaacagcagctatgctaacatttcagaacctctttttaaaagggctattagaaacctcatatctaatgcaatccaagcaattgatattgatggttctatcgaaattaaaattaaacaagagaataaacatataatactttctattacagatactgctggtggaatacctgaagaattaagggataatttatttgagccctttacctttaaaagaagcggaggtacaggactaggtttgttcatggtataccatacaattacaaatactcataatggggaaatgtggtttcatactactcctggtaatggtactacattttttataaaactacccatagcaaatccaaccagtgatcttgatatggataaatataatttaatgatgtaatttaaatgaaattaaaaaaatgcctcccatataattaataaaatagaaacaccccccttatattacagctctaatttgttatataaaatattttttatggaacaataataatcaagctatgtataagggaggaattagttttgctatcaatttctaagcaatataaaataaggtttacaatcttaatattaattatattgattatatctccttcatttaatgctgtggcagctcttaaaactccttcagaggctgacaaagaaattttaagagcagaagttgaaaaaatttataatatacgttcttcttgtcttgtatctggagatactagcccattaaaagaggtatttgatagttcaaaaaagcttggtaaatacacactagagcatgaaataaaacgtgtgaaatacttaaagaaatggtcagaagatcgcggtattcagtttaaaaacatacaatcctttgtaagagttaaaagagttatgccaaggggctcttttgtaaggcttgctttagaggaatcttacaaattcgattatatatataaggatgatccagaacctaaactgaattcttttggagtaggaattagacatacaacaagtttagctagaaaaaatgataaatgggtaatttctagtgattggtacactgactgctttgaggatgcacttcaatcctttactgcagatgcagaacctccttcaactccaccaaattacaatttttttgcagaaaagaaaaccttaaatacctcagtacgctatggagcatatgatagattaaaagcaatagcctatgctgataaatactgcggagcagcttggggcagtggaaatgactttaaatacaaccctaaatatatggattttaatggagcaggcggggattgtacaaatttcgtttctcaagctttaggtgataaagaaggaggcggtctttcacaagatggatcttggcgctgtcctcttactaaatacggaagagcttctggaagtagagcatggagcaatgcagatggactaaaagagtaccttatatacagtggtaaaggaagtattgttaaagtaggaacctttaaagaacttgccattccaactcctagtaatccagatccagccatatcaaaattagattttggcgatattgtttgttatgaaaaaggaagaggtaatatagatcactttgctctaataacctcctttgattcccacggttatccactagtcaattcacatactaccgatagatatcatgtgccctgggatcttggttggggcgataaaaaaataaggttttttctcattcgcatacactaattaaaaaatgtaataaggcaaagtattaaataaatgactttgccttatattcttctttacatgtagcaaagtgttataattatcttatatttctatattttaagtgtacatgctattaaatataataaaacttaaaggaagtgacagttaatggatataactaatataaaagaaatgaattatgaagaagtatttagtataactattacagtagataaacctattttaattggtcaagatgatattgttggaagacgtcagctcataccaattatatctggaaaggtaagtggtaataacttcaatggaaaagttcttccaggcggaattgacagtcagattgttcgtccagatggtaagtgtgaactttcagcaagatatgcaataagattagatgatggtgctgctatctatattgaaaacaatggaattcgtacagtaccagatgaatacatagaggctgtaaaaagcggtgaattcgtagatcctaatgcttattattttcgtacaattccaacctttgaaacatattctccaaaatataagtggatgatgaaccatatatttgtctgctgtgcttctaggttaccagaaaatgtgcttctaaaattttataaaatttcttaaatgattttaattctttatataaggagccacattttattgaggtggatattttagaattctatgtataatggggtgacagtgttgaaaataagcgtaaaacaaatggattatgagactgcaaaacaaattacaaaatggaattatgaaaaacctttttctatctataatatgaatgaaagtgatgagtgtataaaggaattacttagtggctattatttttcagcctatgatgataaaaattatattgtaggttattatggttttggtgaggccgcccagattcctgtaggtgaacaattaggcatttactcatataagaatattactgatataggcataggcttaaatccaaacctttgtggtcaaggtttaggttttgatttcttttgctgcggattagactttgcaagaaacacactatgtgcaaaggattttcgcctaacagtagcaacctttaacaaaccagcaataaaaatatatacaaaactaggttttaagaaaatcacttcttttaaagcaatgtcaaccactggagaaattgaattttgggtaatgacgctatgtatttaaaaacagtaaaaaaagagagcttagccagttctcttttttataaatcattattttatactatatatatttgtcagtttttctatatttaaaagcatcctttttaaacttatgtaaaaatattaattacttgcaattagaatttatttccataatatattttcaatacagcttttacaagtgccataaaaattataactcctgctagagtaaaaaacaccaactgattaataaaaccggcagcaactgctactgcaccaattatgcccaaagcaaaattaaatccagtaaccccaattttgtcgttaatcatttttgttctctcgtcattttcttctatatacaactttttcaattcattttcatctcttagtgcttttgtatattttcccattaataaaagcataactatctctatgcctagaaaaattcctatttgaaatccatgaatcatatcggatatatcattactcggcattctattagtatatacacttgtaagtgctataaaaataacagctacagcattaactccccccataatatacattcttttctttaaactcaccttaaactctttcatcctatagttcctcctctatttccgaaaaatcaaaaatctcttcaattgttaatccaaaataatgtgctattttataggccaaaactaatgatgcagtatatttttcgcgctcaagtgaagttattgtttgtctcgttaccccaacagctaatgccaattcctcttgggataacttatgttgttttctcaactcttgaattcgtgttttcaaataaccatcctccttgcaatgttcgctttgcatttttagtatagtttactttgcatataatgtcaagcttgctttgcaaatatatctatattgttttttaatagccaaaatttttcctcataaaatcattgacaagcttcatataaatctgtattatatagatacagattttagtatacctacttgtatactaggaatatgatttgctaggataagaaccagtaacatagcggaaacttacagagaaaaatctccaaggctgaaagggattttaagtatgaactatgtgaatgcatctttgagcactgctccgaactttgtaggcagcagcggatacgcacgttaaagcgttatggtattttttataccttaaaacgagataccttaactttacgttttggtaattagagtggtaccgtggaattcaacttctgcctctaactatgaggatagaagttttttgtttttataataatataattaaagtattttaaaacaataattaataaattttggaggtcgtaacaatgaaaagaaaaggcatatttgcaagtgctgtattagcattaactttagtaataggtattacaggctgctcaagcagctctagtcaaaagactgcttctcaaaactctcttgaaaaaataaaaagtgaaggtaaacttcgtattggtactgaaggcacatacgctcctttcactttccatgatagtaaaggcaatttaacaggttttgatgttgatatcgctaaagaagtatccaaacgtataggagttaaaccagaatttgttgaaacaaaatgggatggaatgtttgcaggtttagatgccggaagatttgatgtggttctaaatgaagttgcaataaaaccagatcgtaaagtaaaatacgatttttcaacaccttatataacatctagagccgtacttatagtaaaaaaagataataatactataaaatcctttagcgatttaaaaggcaaaaaatcagctcaatccctaacaagtaaccttggaaacatcgcaaagaacaacggagcagagcttattcaggttgatggctttaatgaagctgtagatcttttaacttcaaacagagtagatgctacaattaacgatagtttatcttacttggatttaaaaaagcaaaaaccggatgctcctataaaatcagtagctaattacaacaatgcttctgaaagtgcagctatgtttaaaaagggtagtaacaataaagagcttatagctgctgtaaacaaagctttaaaagatatgaagtcagatggcacatatctaaaaatatcaaaaaaatggtttggtactgatgtatcaaaatagtaaggtgattttatgaatttcgatactaacacattaagaataataaaaattttagaagattctttcttaccattattaacagcgggactgaaatttacagtccctcttacacttatttcatttattttaggcctactccttgcattggttacagctttagctagaatatcaaatattaagcctttagagcttttagctagattttacgtatcaattataagaggtactccactacttgttcaattattcataatcttttttggacttccaactgttggagtaactataaaacctttgacagcggcaataataggttttactttaagcgtaggagcctacaattcagaggttatacgtgctgcaattttatctattcctaagggacaatgggaagctgcttcttctataggaatgacctatactcaatcgcttgtaagagtagtactacctcaagctgcaagagtttctgttccacctctagctaattcctttataagccttgttaaggatacttcacttgcagctactatcactgtagcagaaatgtttcaagttgctcaaagaataactgcaacaacctatgagcctctttggatgtatattgaagctgctttcatttactatattttctgtagtcttcttacattaattcaacactatttagaaaagaaactggctagatatacaacaagatagaggaggaaatactatgataaccataagtaatttacacaaaagctttggaaatactgaaattttaaaaggtatagaccttaacgtaaacaaaggagaaactacagttattataggtccatctggttcaggcaaaactactcttttaagatgtatcaacctcttagagactccaaataagggctctataactgttggaaattcaagcatagattttgataacaataattctttttatactagcgatgtaattaatctaagaaaaaagacaggaatggtctttcaaagcttcaacttgtttcctcacatgacagtacttcaaaacataatggaaggtcaggttactgtgctaaaacgttcaaaatccgaagctagaaaaaaagcacttctccttcttgagaaagtaggtctttcggaaaaacaagatcaatatcctcatgaactttcaggtggtcagcagcaaagggtagcaatagcccgtgcaatggcaatggatcctgaagtgcttttatttgatgaaccaacctctgcccttgatcccgaattggaagcagaagtactaaaagtaatgaaagaactttcaaacgaaggaatgactatgattgtagtaactcataaaatgagctttgctaaagacgcagctcatagagttatttttatggataacggaactattattgaagctggaactccagaacatgtctttacagcttcaaccaatccacgcgtaaagcaatttttaaatatagtaagtgactaaaaaagagatagaaaataaaccaacttcttccgtttttaggtgcaaagcgaaagaatcacctataaaatagcatataaaataacaaaaaaatcacactaaccattagtgtgattttttaatgttaatagtacctactttagtattgtgcagtattttaaataaaaaaatatcgcaaatctattcctctttctgaatagtgcgatattccaatttactattaaattttcatatatactaacatctataagccactctataaattggaatttgtcacactgtcaactgaaataatatttcaaatcctagcaatcccaatccagtaagtaatagaatagaactcatttgccttttctgaaagctcttttttctgtttaataaaaaatataaacaaatacctattattacagttccccaaactgctcctaacatatgcatatacccctctatatgtataattttattaatcccttctgataaaaaaacagcgggcaacaaattagaagtcagtgtatccaaccaatactcagatttattatgacgatatgctccatatccaaaaattgttccaccaacaactgcacacgctaaccacagaagtatataatagtcgccaaactgaaatgtatgcatatttataatagattcaaaccaataataggaaagtacacaaaaaatcaatgtatttatacagattgcaattgtttttatcatcgtctttctcaatagtagtgacgtataaaatgcaaaaataatccatactgccccagaattggccaaactattgaaactaccaggaagatatttttgtccaaatactgtaaagactccaactatgcagccaatcattattgataatataccattcataatattacttttcattgaaatatacctcgcaaattataatttatcttttagttaattatatcatatttcgtaaatatcacactattccgtttttaaagaacacttctataattactacgtcaaatctacataggtcgtaacaacctttttattaattaattccatgtatttatatgtttttatcttataacaaaagtataaatcaattcaaatttatattgtaaataacatataaaacatcatagaaaatagcaataaatttagcagttagaattacatgattttgggttatatttttgattgctattttaaatgtgatttacttttaaagcaagttaaaatcacaggtttgacttacgtgattatatgttattttatagttttgcaccccttatcggaaaccgttgaaaataaactacctcttttttaattacattaacttatctataatcggtgatacaaaaagtatcaatgataaaattattataaatgctacagttaagtacacaattacattttgaagcttattattaatatactttcccataatgtccttattatttattaataataccatgaatataaggattactggagatagtatccctgcaatttgctgggttataagcataattcctaccaaagataatttaggcacaagtaccaaagcagcactaaataaaatcatgaaagtaaaaatcccgtaaaaagttttagcttcactaaatgaattatcaagcccactttcaaatccaaaggcttcacaaatagcataagttgtagataacggtattaccattgtagctagcactgacgcaccaaataagcctgctgcaaagagtattgtagcatagttaccagctaaaggctttaatgccatggcagcctgttctgcactatctattttaatacctgctttataaagtgttactgctgtacaaacaattataaaaaaagataccaggtctccccaaatagcccctaaatacacatctatcttttcatatttatattcctttacactaagccctttatcaacaacagaagattgtagataaaactgcatataaggtgttatggttgtacctatcatccctataagtgttaagacatatccttttgtaaaactcaaacttggtgtaattgtagctttcataactacattccaattaggatgaacctttatgcaggttataatataagtgaagaaaacaaaagtaaacgctaaaaaaactttttctgttttctcgtaagatccttttgtaataacgaaccataccaaaaatgccataataggcacagttatatatttactgattccaaacagctctaagctggctgcaattcccgcaaaatctccaacacatactccaaagttagctataaataatatgcacatagcaaatagtgaccacttaacgccatagttttcccttattaaatctgatagtccttttcctgtaaccacagccattcttgcattcatttcttgtattatagctaaactaaaagttattaataaaagtccccagagcattttatagccatacgatgctcctaccgttgcataggttgctataccccctgcatcattacccgcattaacagttattagtcctggtccaataatacctagtataaacaacagcttgttcttcttcttcattcagttttccctcctcaatgcaggagagcaaacctttatgttaaaacaattgaagcagctttcccacatttataatttttgatatacgagtctttttaatgcataaattactagggtctgcttccattgattccacctccaaacaaaaaataaaaaaagccccataaaggctctataaaacaacaacaaaaatacactatctttcgttgagctttagcactatatagctttgggtaatcccagctacattaagtaaaaccttaattcggtagtacctgttaacccattggcatctttcgatatttttgggcagtagcatatatctatataggagcctcacctaacaatacattattaaattcatcttctaaataataatacaaataagtattactgtcaatgtttcactttcataatcagaataattttcttatatgttggaaaaataaaatatttaatatataagaaaggaggtgacatcatgttactaaaagaaaatacagcaaaagataaaggtattgacagcactctagatttacttaaagagggctatttatttatcaaaaatagagctgatcactatcaatctgatttatttgaaactcgcttaatggggcaaaggataatttgcatgacaggagaggaagctgcaagaatattttatgattctgataaatttaaaagacaaggtgctgctcccaaaagagtacaagaaacacttttgggggaaaatgcaattcaaaccctagatggagaatctcatcttcatcgtaaaaagctttttatgttacttactaaccaagttcaacaaaaaagattagctgaacttacaacggaaaaatgggaagcttctgcctctaaatggcatactaaaagtattgtgctttttaatgaagccaatgaaatactatgtcaagtagcatgccactgggcgggtgttcctttgatggaatctgatataaaaaatagagcagaagacttcagttctatgatagattcctttggtgcagttggtcctcgtcattggaagggaaaaaaggcacgaaatacaattgaagcttggataaaagaaattatagaaaatgtccgctctggaagaataagggctgaagaaggttctcctctacatgaaatagctttttatatagatgttaatggacagcaaatgcctgctgaaatggctgccatagaacttattaatatactacgtcctattgtagctatttcaacctttatcaccttttctgcccttgctctatatgaacattcggaatatagagaaaagctacaatcaaaagacataagatatcttgaaatgtttacacaagaagttcgacgctattacccttttgctccttttgttggtgcgagggtacgaaaagattttttatggaataactgtgaatttaaaaaggaaatgctagttctacttgatatttatggtactaaccacgattcacgcatatggcagaaaccttacgaattcattccggacagattcagaagctataaaggcaatttgtttgattttataccacaaggtggaggtgatcctagtagtacgcatcgctgccctggagaaggtattactttagaaattatgaaaacaagtttagattttctttctacaaaaattgacttcaccgttccagaccaagacttaagctatagcctttctaaaataccaacattgccaaaaagcggttttattatagataatattaatctaaagctttaattttggaattaatttacattcattacattaatcataagctttttctcacattatatattaaatgattaataaacaataatttaaaacaaaaaaatgaataatataacgtcatttagtcaattatattcaaagtaggaggtgatactaatgtcaaacaataacaataataacaacaacaacagaaacaataacaataacaatgacaacaacagaaacaacaacaacaataataacaataacaacaataacaacagaaacaacaacaacaacaataacaaatagtttcatctacaagttttttacgggagcagtttttgcttgctcctataaaacaaataaagtgatagcaaaacaacctaatgttttgctatcacttttactatttctcataaaaatattttttaggaactctttcagtaatgcattgtatttgctcatctacatagcttccaagacttttacaagcctctaaccaagttatgctttcatcgccttgatttcctacaataacagcttcatctagctcctttactgtttcatctatgtttgaaatatctaccattaaaccatccataaaataattcactaccggaaccctcttacctgctactaatacctccttccaacctctactgataccatcaccatatccaaaagcaatgatagcaacttttgaatccttttttgctacaaaagtacttccataacctccagcctcacctgctcttattgttctaaccttcataatccgcccttttaactccattagtgtttttataccttttggcatatttctctgcccctgttcgtgctccaagccaaataaaagggttccacaccgaaccatatcataatgagcttctggatatcttattatgccagtggaattagctgcatgaattattctaggtcttaatttttgtttttgaagttgaaatataatattattaaagcactcaatctgcttatgagtaaaatcagggttgtaatcggggtcctgaaagtgagtatatactccatccacttgaacatgcagatacttttcatgaatttctctaataaactttactgcattttctggatttactccatacctatttaaacctgtatttatctttacatgcaatttaactatagtatcattttgtgaagcactttgatctaatgcttctacaatctcttcactatctaccattggaattatattatatctaataacccaagctgcttgcgatggagaaattggtgcaagcagcataatgggagttttaataccagcctttctcagggtaaaagcctcaatcaatctaacaaccccaaagacatcacattttaaatttatcaattcttttgcaattggacgtattccatgtccataggcatctccctttaagaccgccatgaattttgtattaggttttaaaaatccttgaataatatcaaaattacgcttaagctgacttaaattaatttcagccttgttaacctcaggtatattacaatttacagcttcctcttcacttatagcaatagaatttgtgatattatatactgtttttttctccatattaggtgcctaccttctctctaataattcttatcttttagactgtagacaatctctccattgattatagtgtacatagtttttgtaaaggtctccattggattaccatcaaaaattgcaatatctgcatccttattcacttcaatacttccaactctattagccacattacatatctcagctggatttattgtaattgctttaagtccttcctctattcccaatccctcttttgctgcaagccctgcgcagattaaaagatcttgtattcttgtaacaggatgatctgttgtaattgctacttttacgccttcattatgcagtatacctgctgttttaaaatctgcatattgagtttcaattttatttcttgaggttaatgtaggaccaactattgctggaaaaccagattcttttatctcctttgcaactaaatgcccttctgtgcaatgatcaagtgttaaattcaaattaaactcctttgctatacgtattgctgtcaaaatatcatccgctctatgaacatgtgcctttaatggaattttcttatcaaatacaggtacccagcattcctttctgaactctttgttaaagctgtcacctgacttttcagcattcttccttttctcataatactgctgtgcctcgaaaagttcttctcttaacatggctgctatagctatacgcgttgatggcatcatattctttttatcataatttgctttggggttttctccaaaagcaattttcatagctgaaggctgcaaaacaaccatcttgtctattgctcttccataggtctttaaaaacatccattgacctcctactacatttgcacttccagggccaaccattatacctgtaattcccgcagttaatgcagtataaaaagcagagtccataggattaattccatctaatgctctaagataaggtgttacaggatttgtcatttcattacaatcattaccctcaaagcctctcttctcttcttgaatcccaacatggcagtgtgcttctataattcctggcataacccaaaatccatctgcatcaattatttcacagctttcatctacatcgatattttctcccacctttataattttaccgttatctatcaaaacgcttccactatcataattcactcctgtcatggtaagtatctttccatttttaataagtaacatagcttttttcatcccttccattaattaaatactagctatatgtttacaagttatatatgtaaataaaatagctatatgttatatgtttcttcattatttaattatttatgctttatacattggacattaatgactagagctatatatttgattaaaacaaatatttttttacatagatgaatactttttaattatatagaacataatactagtgtagtaagaaatcacaatgttccgtgatagctcaacggtggagcactcggctgttaaccgataggttgaaggttcgaatccttttcacggagccatttttataaaaaaagagatagagctttctctatccccattgagccaaatcaatgtttaattctaataagtagcttatacatttcctatattctaaaatatcagtccaataccttacatattaattctagaaataaagacttagcaatctcatattttccattctatataagcttttcactattacaccagctatttctcgaatatacaaaaataatgccgctcgaacctagtaggctctttacggcaaattttttattatgaacaacaatattttctagaaaagcatttcccctggtttatatccatcaggtaattcttcttcacttaaaaatttgaaattttcatcacgcagtattggtaaaaatacttggtatggaagcctatcaaactcacagctgtaactgctggctccaaaccacttaccttccttgctgctcaaatttaagtctctagcaaattttgtatgattggaacagtcatgcactgctaaatcccaattttcttcatcggctattttcattagcttaagagttaattctctactccaaattggagatatgtagccttgtctagagatatacatgctttctccataataattacctatgttattctcatttaaatgtagttccgcacagttaataaaatcaagttttgtatctaatattgcctgttttttctcgaaaaaagcttcaaaaagctcaggagtcattggagtctcgatacctacatttttaatatattttttagctataccaatattcttaataactttatcagaacacttagaagctccaaggttgaaacgtatctcgtcaagacctgcttcacctaatgcttttaaagtttcttctgtagctaaagtaccatttgtatatagatgctgataaactttggcatcactaaatttctttactatagaatagtatttttcaatttccataaatggttctaaataaacataggatataccagtaggctttttatggatagaaagaagtaaatcaatatccttttcataaaaccttgtgcccccaatttcccacatatcctctccaataggagcaatatcatcaagttctccataattatagcagaacttacactctaaattgcatttatttgtttttctaatggcacttaaaccagttccaagaagacaagaacgacatcctttaggaaacttgctttcatttcccacaaaaaaagttctattgtctaaagttttcaaacttttaatttctgacatcaatttattatttctattatcaattgctgcctcgatttgtgcaaaggtagaataaatgatttcttgttgctttatcatcggttcctcatcctctggcagcattgaaaaaaattcaaaccatgttaacgcatctttttttgaaattttcataacatgtcctcccttagttaatccttatgaatacttcatacaaatcttctttacgctttttcatatattcttcaaaagagatacatgaacctatttaattatatactaattatgttgttttgtatgtaaataaaacatgtatttattaataagcagcctaatttacaaataaaaaagaatagccactaaagctactctaaatttaaacattgtttttatttagttttaaaagccattaactaacaaaataatatcttatctttctcttcttataacctttttcctaacaaatatgcctgcagtggatagtccgtcttttcaaggtcttctcttgcggggcagcctttcgctaatagttgtccataatcttgccattgaagatatttgagtgcctcagtataacttcccgcaatacctttcattgcccattctctactattagtacctgttacaataagtatagcctttttatctgcccccctaagcatattattaatgctgtagaagcgatctatagctatttttatttgagctgacatcccataatagtatagaggtgttacaaatgtaatcaaatcagcctctataagcttaggaaacaattccaccatatcatcttgaaaaacgcatggtttctctccacatttacacttattgcacgcaacacaaggatgtactttcttaaaggctgaatcaaagcgataaacttcatgtccagcttctttagcgccctcaataaagcgctcggtaagtaatgaagaagttccatctttatgaggacttccagttaatactacaattttcatagactactcatcctttctctatttttactcttttattatagtataaatatagaaaaatcaaagaacgcacttttttgtaactctctatttattatatttgtgatttccgtataatatagccttctatctatatatttttcataaaaagctcttttaaaaaatcaggaaaatgcgtaatcatactgtatgtaaatggaacagcaaccttataacgagaactaagatgctccttcaaaattatattactaattgttgttgctgtttctgttggatcagcctgcttctgcttttttctatatttgctatccttttgataaaaataagaatagcaagaatttaggttggatataacactatttgaattttcagctaaagtcttaaaaaagttggtctttatagggcctggttcgataaccgttgtctgaatattatagctgctcagctctaagcgaagtgcatcacttaatgcttcaactgcaaactttgctgcacaataagcaccattaatcggttgaacaaatttacctgaaattgatccaatatttataatcttaccagtttttctctttcgcatctctggaataaccgcctgaagcatgttaattataccaaatacattcacattaaacatacttttcacatcacttacattaacctcttccaatgcacctctgactgaatagcccgcattattcacaagaatatcaattttatgaaagtttaacataacttcctttattgctttatgtactgattcttctttagttacatctaaaggcagcttcaaagctgcgggcaaatcctttagatcctctacttttcttgctgttgcaaccactgtatatcctttattatataatattttgcaaagctccctaccaatccccgttgaacatccagtaattaaaacaactattttattttccataataacctccatcaatataatttggctacattataaatcacttggagattactttcattatcatttgttaatatttaatttccttcttattctactaagtgacacgggcgttatccctaaatatgaggcaagataacattgtttaatacgattttctaaccctagcttctcagaaacaaattgcttataacgttctatactactcaataatttaaaactacttgcatgttcttcctttttaacaagaactctatcaatcatttttttgtaacataaaagtagattataatttccttcaactattttctcaaaatcagaaatcttagccacaagaatttcactgtcctctaatgcttgtatgctatacatagattccttttgagataagtatgctgcataagaaaacaatgtctccccttctgtatgaaaatgctttgttatatcgtttcctagtctgtcaatatagtaagaacgaaaaactcctttaacaataaatgccacctttatagaattatctccttgcttcagaaacagactattcttttttaatagccttgtactaaaaacatctttaagcaaagaaaggtttttttcatcaagagaaatcgaattactcttcaaaatattccaccataaattgtcgtatgtattattactcatgatgcattccctcctctattttatatactctcattcaatattatataataaacagaacactataaaaaagagacagaactgctcctatcccttcaacaataaatatcacatagaatgtatagccttaaatatttaataatctcgatatattatcacctaaaactgcattagcaacataagagtcattactcattttttttattgcttctattgatagctgcaaatctccaaatggcatatccgtgccaaaaatacattttaatggaagttcattaattactatctttaaaacaaatgtagaaaaatacgccgaagtatcgagatacagattttggatttcctttgcaagttctacagctgtcatccaattgcttcctcccatatgccctaatattacaggcaccttagggaaagccttacacagttcagcaatttcttttatatcctgtaaaaccaaaggattaaatgcatgtatccaaattggcagacttcccgaatccatagaatacttaaaaataggctttaatgattttatctgcccacttgcaggcgtaagttcacctatacctacaagtttgttatttactatattttcttcaatatatgagttagtatcattttcacttaatccaacaggtacgttaccaaatccaacatatctggatggatatgcttgtataacatttgtaagttcttttatagaattacgtcttacatctatcatagaatttgtttttccattaactacatcatttaattttttcatttctttttttacatctctaagattcactgccgtttctgggtgtatggaagttgaaaataatatagtcttatcaacacctgcctcatccattattttaatgtgtttttctactggcaaaataacatgtgtatgtccatctataatcatatttatctctcctttatataaattcactctcattataaccaactgttgaaaaaatgaaagtatgcacttttttgtgatatactatcataaaggagagtggcattattgaataaactttgttatgtgaacaataaagagcctttcgaatacactttgtctattatcagcggtaaatggaaattaaaaatcatttatcttcttgcttgtcttggaaccacaagatatggtgttattaaaagaagtatcgatggaattacacataaaatgttaagttcacagttgagagatttagaaagtaaaaatatcatatctagaaaggaataccctcagattcctccaaaggtagaatattctcttactgaaaaaggtgaaagtctcattccacttataaaagacatgtgtgaatggggtataaaaaacatataactgttattgtattataatcaataataatcaaaaagagctagttatttaaactaactcttttattctaaaatgtctaataaattttagtcgtccactcctcgcagttccaaacatcagtaactacatccttatagaattcaggctcatggcataccaaaagaatacttcctctgtactccttaagcgcccttttaagctcatcctttgcatctacatctaagtggtttgtaggctcatctagaattaatatatttgtctcattatttataagcttgcaaagccttaccttagcctgctctcctccgctaagtaccataaccttactttctatatgcttagtagtaagtccacatttcgcaagggctgctctaacctcgtattgagtgtatgcagggaactcctcccaaacctcttcgatacaagttttatcatttgcctcttttatttcctgctcaaagtatcctatatattgataatctccaagctctacatctcctgaaataggttttatctttccaagaagactttttaaaagagtagtttttccaagtccattagctccaactaaggctattttctgacctctttccatagttaaatttaaaggctttgaaagaggactatcatatccaacaactaggtctttagtttcaaaaattagctttcctgaagttctagcagttttaaagttgaactccggctttggtttttcttgagttttttctattatatccattttatcaagctgcttttgtctagctctagccattcccgtagttgcaacccttgccttatttctagctacaaaatcctttaattttgcaatctcctgctgctgtctttcataagctgcttcaacctgctttttatttgcttcataaactctcatgaagttatcataatctccagcatatctagttaattttctgttatctatatggtatattacgttaataacagaatttaagaatggtatatcatgagatattaaaataaatgcattttcaaaatcatttaagtatctcttaagccattcaatatgaacttcatcaagataattagtaggctcgtccagtaaaagtatatccggcttttgaagtaaaagcttagcaagaagaacctttgtcctctgaccaccacttaaatcagctacatccttatcaagtcctatatctgtaattccaagtcccttagccacttcttctattttcacgtctataacatagaaatcattattatctaaggtatcttgtattgtacccatttcatctaacaatttttgaagttcgtcttccgaagcttctgccatcttgtcagtaatctccatcatatttgcttccatatcaaagaggtacttaaaggcatcctttaatacatcttttatggtttttcccttttgaaggcttgcatgctggtccatgtaaccaactctaacattatttgaccactctatggttccttcatcaggcataagttttcctgttattatgctcataaaagtagatttaccttctccattggcaccaactagtccaacatgttctccctttaaaagcctaaaggatacatcctcaaaaatagctctatcaccaaagccatggtttacatttttgacatttaaaatactcactttgacctccacaatttacattaataaaatactctacatgactaatagtttaaatgaagctaggacatttttcaaactaatttttctacctctttctgtatattctgcatcttaatatcagtttcagatatcacatctgcacattcttttaattcacatcttatgatttcagcatccgtacctagtgttttgtaatataatttgtgctccaagcttgcccaaaaatccatggcaatagtccttatttgaacctcaaccctaacaggttcaacatgatcagaaaagaatataggtacctcaagaatcatatgaaaactcctatacccatttggcttagggttttttatataatccttctcatttatgagctttatatcatcttgatttttaagcatatctgcaatttcataaatatcacttacaaaagaacatacaactcttatcccagctatatcattcaagttttcctttgctgaacgaaagcttacttcaagtcccttacgctcaagcttatccattatgcttttaggatctttaactctgtccttcatatattctataggatttctttttctttttactttaaattcattatccaaaatttcaagctttgttttaacttcttttatggctgcgctatatttcattatcatctcttgcatttcttctattctttcctcaatatcatattcaacaatatcgtcggcgtcttccaattgtgccatagttatcctccctcggtttaacctatcccaacataattaatatatacttgcatttaatcacatgatactacattttttaatttcataaaagtcattagaatatttttaacaaatacattatcgtttttttatacatcgttaataattgtcgaacttcttatatgaaacttaactaaaaaaatatgttattattatatataatggaatggaatattaaccttgtaggttataaatcacaatgttaatattcttatattatatttttaatattggaggtctttatatgaaagtattacttatcaatggaagtccacatgctaaaggttgtacttatactgctttaagtgaagtggcaaaagccttagaagaagaaaatatagaaacggaaatttttcaaatagggactaagcctgttagaggatgtattggctgtggtacttgctcaaaaacaggttcaggaaaatgcgtttttgatgatgacactttaaatgctggtcttgaaaaagccaaaactgctgacggatttatattcggctctcctgtacattatgctgctgcttcaggtgctttgacttccttcttagatagatttttctacgctggaaaagattttgcatacaagcctggtgctgcaattgtgagctgtagacgtggtggtgctgctgctgcttttgaccaactaaataagtatttcacaattgcaaacatgcctatagtatcctctcagtactggaatatggtgcatggaaatactcctgaagaagtaaagcaggatcttgagggaatgcaaactatgagaactcttggaaaaaatatggcttggcttttaaaaagtatacaagcaggaaaagaagctggagtaaaattaccggaaaaagaacaaactattagaacaaacttcatacgctaatttttagcaaaagcattaaaccttatttggctttaatgcttttttaaactacagttaaataggttatatttcaaaaaacttgtaaaagaggtgaaaactttagttatatgctaaaggactatatgataaataaaaacacaaaaataggctttatcggaacaggcgtaatgggaaaaggtatgataaaaaacctattaaagggtggatacactgtgcacgtttataatagaactaaagaaaaagcactgcctttagttgaaattggagctgtactagaaacatctataaaagagctttctcaaagatgcgacgttataataacaatggtaggctatcctagcgatgtagaagaagtatactttaatgacaatggaatactaaataaccttaaacctcaaagctatgttgtagatatgacaacttcaaaaccatctttagcaaaaaaaatatacgctgccgcaaaggaaaggaacattttcgcacttgatgctcctgtttctggtggtgatattggtgctgctgaagggactctgtctataatggttggtggagacaaagaagcatttgatgctttaatgcctatatttgagcttatgggaaaaaatatagtacttcagggttcagctggttcgggtcaacatacaaaaatgtgtaaccaaatagctatagcttctaacattatgggagtatgtgaagctttatcctacgcaaaaaaatctggccttaacgctgaaactgttttaaaatccataggtgcaggtggagctgcaagctggcaattaagtgcttatgctccaagaatactgaagggtgattttaatcctggcttctacattaaacatttcgttaaagatatgaaaattgctttagaagaagctgatgaaatgggccttaaaacaccagctttagaactttcaaaaaagctttacgataagcttataaaggaaggaaaagaagacttaggcactcaagctctttaccatctgtacaacgaagattaaattcatagggtttttcacataatacttgtggaaaacctttttctttaccattaattatccacaaagtattaacatatccacgtttaagttcaaaaaattttttgtctatctttacacgaacatatgtttgatggtataattaataaaaattggaggtgattttgtggatgtatttgaaaaacttgaaattttaactgatgctgctaaatatgatgcttcctgtacttccagcggtgttgatagaaaatccaagttaggcggcatgggcagtgctgaagcctgcggtatatgtcacagttttgcaggagatggacggtgtatttcccttttaaaagtccttatgtctaatgcctgtatttacgactgtcagtactgtgtaaatagaatttcaaacgatactcctcgcgcttcatttacaccacgagaactagcggatcttacaatgaacttttatagaagaaattatatagaagggctttttttaagctctggtgtgatgaaaaatcctgattatacctgtgagcaaatgattgaagttttaaggattttaagatacgaatataatttttacggatacatacatgctaaagcaattcctggagccgatgatactttaattgataagcttggtatgctctgcgatagaatgagcgttaatatagaacttccatcgcaaaaaagcctaaaactccttgctcccaataaatctaagcattccatactaaagcccatgggatatattaaaaataaaataagcgaaaatactactgatatagtaagatacaggcatgctcctaaatttgttcctgcaggtcaaagcacacaaatgattataggcgctacccctgatacggattttcaaattttaaatcttactgaaagcctctacagtaaatataagctaaaaagagttttcttttctgcttacatgccagttgcctcaaacccacttttaccatcagtggatactaagcctcctcttttgcgagaacatagactttaccaagcagattggctgttaagattctatggctttaaggcaactgagcttttagataacaggcatcagagttttcacccgtatatagatccaaaatgtaattgggcccttaatcacatggagttttttcccgtcgatgttaacaaagctcccttcaaagtattacttagagttcctggtataggagtaaatagtgctagaagaattgtaatgacaagacgaactgtaaatttaaactttgctggattaaagaagcttggagttgtgttgaaaagagcccaatattttataacctgctgcgggaaaagcatggacggaattaaaatatctcaggactccgttttaagatctctgctatctgaaaaatctcttgatatgtataaaaataatgttcctattgaaacacaatatgaacagctatcttttttcaataacaaagctctcttaagggaggaaattcaaaaatgcctaacaggtcaaatttaatatattattatgatggcagctttgaaggcttaatgtgctgcgtttttgaaagctacgaaaaaaatgaaataccggtgaacatattagtaacaaataacgctcaaatgacactatttatggcaaaagaagtagcaactgatttagctaaagcttcgagagtaataaaatccatccctctaaagatgggagtcaatgcttttgattttataaagagagtttttttaacctgccttgaagacaaggaactaaaccttctactttttatgcgccttggttatacatacggccctaaggttatgaacatgctatccaacgatatagtacatattctatttaaagcagtaactcacctaaataaagaaagccatctttttaaaggcttcatacgtttctcagcttttaaagatggattagttgcacaaatagaaccgaaaaactttattcttccccttttaagcagtcacttttgttcaaggtatcctgaagaacattttttaattcatgataaaactcacgatatggctcttatatataaaccccataaagccagtattatccctgtagaagacatgaggcttcctgatgttacagaagaagaaaagcattttagaaagctttggagtctttactacagaactgttgaaattgaaggaagacataatcctaaatgccgtagaactaatatgcctaagagatattggaaatacctaacggaatttaactgcgtacaaaatcttgactaatttaaatagaaaccttcaccttgactttttttcatatataatgtattgttatgtagaccagtcattataattaggaagtgaattattatgaaacacaaaaacgattcgagagaaaaaattttaattgcagcagctcatcttttccaaaccaaaggctttaatgctactggattaaatgaaatattaaaagaaagtggttccccaaaaggttccctttattattactttccaaatggtaaagaagaattggctttagaagctataaaggtttctacccaaaatattaaaagcaatttaatgagggatatggcggaatatgaagatcccattaaagccattcagtcagttgttactcatataataaacgacttgaaaacatatggaaaaccaaaggacatttcactaagccttttatcactagagacatattcctccagcgaagctttaaaaaaagcatgcagggattcattcatggaattacagcatatttactttaataaattgattcaaagtggaattaaggaggagactgctgaatttctaagcatgaccatacttacactactagaaggttccattactatatctctaacacaagaaaatcaagaagccctttttaattttcataaacaaatagatttattattgcgtccttatttatttaaataagatgcattttttcgcagtaatttatatagactggtctaattaataattaaggagattacactacatggaagcaaaacaaatttgtacagaaactccccctaaatacaatgtaaaaggaattatgtttacccttttacttgctggctttttatccctatttaatgaaacagtattaaatgtagcatttccaactcttatgaaggaaatgaatgttactgcactaacggttcaatggttaataacaggtaatgttttagtagttggaattctcgtaccagttacggcttttctacttcacaccttcaccacaaagcaattatatttatcttcgatattattccttttattaggaacagtatgtgctatattttctaaatctttcacagcattacttatttcaagaataattcaagcatttggaacaggcttaataatccctctaatgatgaattcttcattagctataacccctcgagagaagcatggttcaattatgggactttgtgcttctatacttacattaggccctgctttaggccctactgcctcaggaatacttttgcaatattttagttggcattctttgtttattgtattagttccatttttaattctttgtataatcttaggttcaatttttcttgagaatacttcagaaataacaaagccaaagattgattatttatctattgttttatccactatagcttttgctggagtaatatattctataagttcactaggtacttcaaagctatcaacttctttagttatattggctgttggcttaatttcattaataatatatgttaaacgtcaattaaccttaagtgccccaatacttgaattgcgaccttttaagaatcctgtattcactgttggtgtgctattaatagctattgtgcaatcttttcaattttcagcaaatataatacttccaacactgcttcaagatggattaaaaacttcaacctttacctctgcacttgttttatttccagcaatccttgtttctgctatatgcactccatttgtgggcaaaacttttgacaaaataggtggaagattattaataccatgtggctttgcaataatatgcgtatttacctttatattgtctagggcttctcttacaacttcagttttgacaataactctactttactgttgcataatgtttggacaatcaatgacaatgtcaactagccaaactacctctttaagtgtactaccaaataaaactcgagctgatggtgtggctatagtaaacactgcaatgcagcttgcaggagctttaggttcttctgtgtacgttggcctcatgacttctttccaaacaaaatatttaacatcacatcctggaagttctagagctgccctatacagtggatttaatggttctatcctcattgctgcaattgtaataggtgtaggttttttactgtctctttacttatctattaaatctaaaaaagtaaaataataaaaaacgaggatttacatatcctcgtttttattatttatcttttccgttatattcaaaatcgcattcctcaagcggaactagcttagttttcttaatgtatttatatgctatatatagtgctataaatataggaatacaaatgtaattacttataaaatcaaaccaactgaactttggagcctgaaatatccatatgttagctccaaatattattactacgcataacactattgccataataggaccataaggataaaacttagccttaaacttcaagtcctttaaatctcttccttgcgctacataagcttttctaaacctgtaatgacagattcctataccaagccatgcaaacaatgctgttattccagatgcattgtataaaacatagtatatctttccttcaccaataagtgatgacaaaaatgcagaggatgcaactaaagttgttgcatataacgcattcataggtacaccttgcttgtttacctttgctaaaaacttaggtgcttttccttcttttgcaagagaatatagcatacgtgatgatacataaagtcctgagtttccgcaagaaagtactgaggttaaaattacagcattcatagcacttgccgcaaaagctattccacactttgcaaataccattgtaaatggactatatgctatattattaactccactttttaatagattcttgtcattaaaaggaactagaaagcctattattataattgcacaaatataaaatagtagtatacgccaaaaaacagatttaattgcctttgggacgttttcctcaggattttctgtttctccagctgcaagtccaactatttctgtacctgaaaacgaaaagcctgcaactaaaaaaacatttataattgctgctattccacctacaaacggtgctctcgaaccatttcccgatataacccaatttttaaaaccaggtgaatcatttcccataattccaaatatcataagtactccaactatgataaatatgattatagtaactaccttaatacttgaaaaccaatattcgctttctccataagctttagcagaaagaatatttagtataaaaattacaagtaaaaatcctatgctccaaatggttgtattagtatgaggaaaccaaaacttcactataagtgatcctgcaactaattccgatgccacacatatggaccaagaaaaccagtagttccagccaagagtaaatccaagtgctggatctacaaatctagtagcataggtttcaaaagaacccgaaataggtaatagtgttgacatttctcctagtgacatcattagtacataaactagaattcccgtgattatatatgcaagaagcgctcctcctggtcctgctgtgcttattgcacttccacttgcaaaaaaaagtccagttccaacagagcctcctattgcgatcatattcatatgccttgccgtcagtgttctcttaagctcattcttttgttcttttttagacgtcatttccatccctcataatctgttataatattatttactttaatatattaccacactatcatgaataaacaatacattatataataatatttagtatatttattcatacagaggaggttttttcatgtcaaatccaattaaaagtatattagatgattttccggtagttattctagatggggctcttgccaccgaattagaaaaaagaggctgcaacttaaacgactcgctttggtcagcaaaaattcttgcaaacaaccctgaaataatagaaaatgtccattacgactattttgtttctggctctgattgtgctataacttcaagctatcaagctacaatagatggttttatgaaaaacggctttcctcgggataaagcaaaagatcttataagaaactcagttgctatcgctaaaaaggctagagatagattttggggcaaccctacaaacagacgcaatagagcaaaaccttttatagcaggttctgtgggcccttatggtgcttaccttgcagatggttccgagtacaggggagattataaaatagatgaaaacgcactaattaaatttcacaaatctaatgttaagcttttgatagaagctggtgctgatattttagcttgtgagacaattccaaacctaactgaagccagagccatagttaaacttcttgaagaatttcctggtgtatatgcctggataagctttagctgtaaaaacgattatgagataagtgatggcactcctatttttgaatgtgctaaagttttaaactcctgtaaaaatattgctgctattggagtaaattgtacttctcctaagtacataaattcacttataaaggaaattaaaaaggcatctgataaacctataattgtttatccaaattcgggcgaggaatacgatgctaacacaaaaacttggcatggtgcttcttcaagcaatgcttttagtataagcgctaaagagtggtttgaaaatggagctagtgttataggtggctgttgcagaactacccctagcgatatcaatgcaacatacaaaattttaaaaaatatagattaatacaaaaaaacttatacacttagcggtataagttttttttaattccagttatttgattcatctaaaactatctctataaatttttccatggcaggaaacacctttttgtttttatgataaattattttagaatagtacttttcaaaagtttcatctaagtcctctgcttttatactattattattcaattcttccttaattgaatagagaggaagtactgatgctccaagcccatttattacacattttttaattgcttctatactagagagttctaaaggatttttatattttattttcttcaatttcagataactctcaaatgaattgcgaaagctacatcctttctcgctaaatattacattttcgctatttgaaaatccactactcgatatcataaccaacttttcttcctttaactttgtaataaacaagttatcgtctaaaatacttggctcaatagtgaaaattaaatcaaactcaccatcataaagtcttttccttaaatcgctgcaaattgaattttttaaaactatagatactttaggatacttctctttataatttctaagtattttatcaatcctatatatcgatagtgattcaccagctcctattactatttctcctttaacctcatccgcctctttgctcatattatttatttcactatgaattcttagcatttctctagcatatggaagtaactgctttccaaagctggttataactattttcttgccaagtctttcaaatagtgtttgtcctaattcttcctcaagcgcctggatatgtgttgtaactgttgattgagcataccctaaatgttctgatgcccttgtaaatccattcttttcaaccactgaaacaaatgtctgtaagtgtcttatttccatactaattcatctccttatttttatattatcatatttatcgattataaacttcatatatttcaattttactgattataaacttagacatatactttatatacgaggtgattttattatgaaaaaaatacttttattattagcaaatggttttgaagctgtcgaagcaagtgtttttactgatgtattagggtggaatatgctggaaggagatggaagcacacttgtggtgactgctgggatgcatgacaaaataaaatgcacttggaactttacagtattacctgaaattaaaattaaaaatgttaatgtggatgatttcgaagctcttgtaattcctgggggctttgaagaagctggattttttattgatgcctacagtaatagtttcttagacttaataagaacttttaatgctaaaggaaaaataatagcttctgtatgtgttggcgctctctctattgggaagagcggaatattaaaaggcagaactgctaccacttataatttaaatgacaggaaaagacaatacgaattatcgaagtttggagtgaagattctagagaatcagccaattgtaatagataagaatgttataacttcctataatccttctactgcatttaacgtagcatttactcttttagaaatgcttacatctaccgaaaattgtactaaagtaaaaaaattaatgggattcatttaaataaatcccattaattttttatcattattcagatttattagttttaacaaatacataattttcaacatacttatgaaagaatatttctccaacacctgtagctacagctgcaacaagtgcatcgataaccgatatacgaacattataccaggaataattaaacataagtataattaaaaaagcaagaccaatatctgaaagggttgcaacaaaattgttagaaacacgtaaaatcataagatctccaacaatgtaggcaattgctgttactgctattgaaatatatactatatctccaaaggtcaaattagtcataagtttaagtacaacttctaaaacaattgtaaccattacaaactttattattaatgccaatgcatgtttcattgtaatgcctcctttgtagcttttttatataactagtattccttttattatttcaaatatccgtttttaatagctactaaattcaaagtaattgttttattatacgcataaaaaagaagtatgttttgataacattatgacaaaacatacttcttcttaaactttaaattttaaacttatttattatactattaagttcttgtgacattgccgtttgatttttagctgtgtctaaaatttcattgattccgtttgacgcttcattaatactatcatctataacgcttatattttctgaagaactctgttgaagcactgctgtattttgtacagcttcacttacttgttcgattgctgtgtttaattcgttaaccattgatgcaatttcagtagacatgctacttataaaatctgcatcctcataataattatcacctattttattgagctctcccagctgattggatatatcctcttgtataaaccttaatatctcttcactacttgtagctatattcttaaatgcattttctacttttatagttacatctttaatactgttagctgtttttgatgaactttcagctaatcttctaacttcatcagctactactgcaaaacctttgccttgttctcccgctctagctgcttctattgacgcatttaaagcaagaagattagtttgctctgctatgtccgttattgcctctgtcataagtcttatatcttgtacaacttttccttcttcaatacaacttagaattctatcttttttctctttataaacttcatctattttttcagatgtgctctcaactctatttttaacttctgacgctcttgttttagctccttcagaattatttctaccttcgttagccttatttgataattcagttacataagagtttatctcttctactgatgctgtaatctcctctgatgcagcacttgtactcattatgtctgaagatatcttttttgagcctccatttatttcattaaattttaccgacatatcacctactgtagacgaaagcttttcactagaaatacctagcttgtcagaagaggtcataatacttttaaccatttttataagttcctttttcattctaacaaaggacttaatcaaaactccaacttcatcgttgtaattcaaaagaaaatcataactctcatcatttgttaaatccaattcagctgtcctatttacaaaagaagttgtggctataataggtttagctataactcttcctataataacagctgcaaatgttcctagtgtaattaaaatcaatgctaatacagttatatatatctttaaacttgagaatccgcttagcatttctttttttggtgcatctactaccattatattcccattaattaatttactgtatgcaaacgctctaccttcaccatttaacttatagtcttcaaccccattactgtcagatgccattttatcagtatatttgctgaataaaccattatttactttttgaaaactatctttagtcgtatatttcttatcaacgacaaaattaaatttgtcattaagtagataggcatatccgctattatatagcttaacattatttatcatcttaacataatcattgaaatataagtcgattgcaattacggcaactaattcaccatttttaaaaatcggtttagtatatgcaattctcatatccttactatttgcatttgagctttctgatgcatcataatgaggatcactccaaattgctttcttggaattcacaggattatagtaccaagccatactttttttacttggatcaaaatcacttattgaaaatttacttatctctttaacctggcttccttctttttcatagcaaatctgatacaaattttttgttacttccggattgaataaaacagtaattcctaaaaccttattatttttagtagcaatctccttcatatattcatcaatcgattgcacatattcattcgtataatttccatcaatcttagctctatttgcatcaaaattagaatttattaagttttctacatcacttgtggatgtttctgtgttaagcaaaagcttatttacatcattagctttattttgagatacctccattagtttatcttctgcctcattagtaactaaacccgtagttttttgaatacagaccactgctgtaataacaatagacagaatacaacaaataacaataggcagtattatcttgaaacttatatgttcttttgttttttttaataattccatttacttcacctcttgcttttatacttttctataatacatctattatcgaaacacaaaagaaaaatattagaattattttaaataatatactcttaatcataataaaaccatcaacagatgcacacgtgttctctttatataaattaaatatccatatttttttcctttaataaatactattctccagcaaccttaagttcctttaattttctaaattcaaagttttcaagaggaacttcacttaaaaattcaatcacttcattaaaattatccactagattaatattcttttcatcaagcatagctcttagcgcgacgttctcccaatcaatccatcttacataactattacattccttgatataatctctaaattcactattcccttttaaaactttttttacctcttcacatataaaaaagttacaaacgaagcttctgtattgctgtggtaaagcgcatcctttttcaggttctacaaaaggacatgctctaaagaatatagatttatctttaacatcctcatattgattattagaactaatatacttattaaacgacgtcttatcaaaatatcctttagcatgaatataataattataaattttagtactttgaatgttaagtatctttcttaaagtttcacgtccaagattatttttagacattttatgaatttcataaagcgtaaacttaggaaagtaccagcagcatcccctgctttttattttacacatactttttccataaacgctattacaattgctacaggagctgcatgcatattgcggtgttccatgatccaattttaaaaaaaccttaaccaaatttacccctcccattaaatacaagttctatataataatatccttgccataaaactcaaactccaaactgcatatataaaaaactatgactaaaattatgattgcaaaattgatcataacctctagtcatagccttcgtgaaattaagttttatatatttaattttaaattgaactctctgaaagcttattattgaaatttcttctatattttatcaagcatggaacctcataagctaacattactatccatcctcccaaacaactaaaagcaattccaaccatacctattctaggtgcaagtatatatgaaaaagctactcttcctactatctgagagaacgtagatcttaaggtgattttcatatctcccatacctctaaaatacccttgcacaccatttgtccaacttggaagtaagtagaaaaatgccattagctttaggtaataagaaccaatgcttataacctttacttcgcttccacttacaaaaagtttcattatagccgtagatcctaaatagactattccaactaaaatacaccaatacaacgtctcgagcttcatccctgttaagaaacctttttttatacgcttgtacttatttgctcctctattttgagctaaaaaagtagtcatagcattgcttatgctttgttctggtgcaaatgcaaaatcgtctacacggtttactgcattgaaagctgcaatggaatttacccccaaaggattaaccgctccttgtaccataaacttacctacatataaacaggtctgctgcattgctgtagcccaactataattcacagttgatcttaaaaggcctttatcaattaccatatctttaaaagaaaactttagtattggtattttaaaatgaacatacacaatacaaaagacacaggacatcatctctgctacagatgttgcaatggctgaaccggccacacccattttaagccaaacaacaaatacaatatccataactacatttaaaactgctgatatcatcaaaaaaagcagcggatttttagaatctcctatactcctaagtgcagctgcatatatattataaaaaaaagtaaatataagacttataaatataatcctaagatatatcgcagcttccggaattatttccttaggtgtttttactagccctaatataggttctgtgaaaatcacacaaataataataattaaaacagtaaatataaatccagctataactgttgtagaaatctctcttcttaatttttttacgttacctgctccgtagtattcactcataagaacagatgctccaagacatattccaactataaaaaacatgactatattcataataggatttgctataccaactgctgctaaagcattctttccaacaaatcttcctacaataattgaatcagaagcgttataagttaattgaaatagattgccaaggattaggggaatagcaaatttaatcaagtgctttgacacattcccttctgtcatatctgtagccaaacttttcaccatccaataccatttaatgcacacgctaacaacaaaaaattttttttctataatttaagtatatacctgttcacatttaaattaaagaaccgattacttcaaatatttttacataaaaaaagtatgccaaacaaaatataaatttcatttggcatactaaaatatttttctttatgcagttactttgctcatcattacatcagctagttgtttaattgaatttccttttaaaagttcaactacagaaataacaatatcaaagttaactttaatcttatgttttatttcattagccatcattgaatctatgccaagatcactaatggcatcctcaacttttatctttgatgcatcaatcttagtaacatccgagattatattcttaagacgattctcgacagaagacttttcatccatgctttcttcaatagcagcctcttctaaatcattttctaaaatagtgtttttactatgcgaagtattttttggtttttcctcttccaacaaatgttcaaaggttaatggtatattttctgtgagataagattttgtagcaagcgaccattttacattaggaactacacaaacctcagaaagcttagttcctataagtgattctaaaatcttctcaccagctgctggagaaatgcttcctacacctctctcctcaaaatattttgttaaatcaagctcttcagccattcctacctctgaccatggtccccaatctatagcaagtgctggcaagccttttgatcttctgtaatttgcaagagcatcaataaaagcatttgcagaggcataattactttgtcctgctgacacaattaatttagatgccacagatgcaaacaagataaagaagtcaagcttctcctttgaaaatacctcatgaaggttccatgatccttgtacttttggagcaaaaacctgcctaaaagtatctaaatccatactatcaataggcttgtctctaactataccagcggtgtgaattacaccagctattttaggccaatcttcttttttatataattcaacatattccttaagtttatctttatctgaaacatcaacatttgcaatatgaatatttgctccaagtctctctagttcttttacaaattgtattctactaaatatcttagaatccttatcaacacttctccactcacatctgttaggcaaagccgttcttcccataagtatcaagtttcttgctccatgtgctatcatccatttactaaatagcatacctaaagctccaaaagctcctgttataagataacttgagtttttgtcaaattcaattggaagctcatttttctttgtatctactctattaatgcgtgaaacaaatctcttattgtctctaaatgcaatttcagattctctatcaggtaaaactatctctttgaatagagctataatattgcttatgttagaagtagcctccacatcaatatcaactattccaccccataattctggtttttcattataaccaaatactcttgaaattccccaaatagaagactgataaagtcctttttcacttcctattccattaacaaattgtgagcctttagtaactgtccatatcttaggtgctatattcaatttactaatagcctttaacatatttaagagtgcaatactgcctatattggtttgagctttaagactcttatcttcaattgattcctcaccatgtgcatccaaaggccatagatttataatttttgttatttttttattttcagagagctgtataaatactttttcaaagctctcctcttcttctggatttaccttaatatgttctcctgataaattggaagcatactctacaggaatgcactccactctatttgattgagctaatttaatgaactcacttccaaagcctgacttatcgcataatacaacccatttttcctctgaacctaaaagcatactcgcttcttcagccttttccttttcttcccagtcaaaggaatataaacatttatctatatttgtactatctctcttctcatcattattaatatttctagcctctattgagtcaatctcagcaattatttgcccaaatctatcatatatttttaagtctgcaaccatataatcatttgttgctattcttgatttagcataagtccacatgattggttcaagctttttatatactttaagtcctttaatccccataggtatcaagccttctcctgctgcattccttactgaaggcattattgaaatcatgctttgaagtgtagaatctaataatgcaggatgcagtacatggtttattttaaaatccaaagtttcaataggagcttctattaaagctaaaacttcatcttcgcctctccaaagcttttttactccttgaaaacttgttccatactgaaaaccatagtcactaatatatttataaaattcgtccttacttatagtttcagtgcatctatcttttatctcatctatagataataatctagattcataaaaatttatgcttctacctagttttgatatgcaatggcttgtccacttattagtattacttgttggtctactaaacacttctatagttctatctgaaggattataacttgtacgaactataggcgcatcatcattatttaagaacaatgccctactaaactgtatgtccttcatataaaattctgaatcttttactacttttttagcgcaagcaaaagctaattcaatataaccagtggctggaaacaatatagctccttgtattttatgcccactaaggaatggatttctaaactcgctcatttctgtttcccaggaaggcttttctgatctaaggggacgtccaagtatggaatccatgtttttacctaatctgatttcctgagacaattcgctctctatccaatacttttcgcgctgccatgcatacttaggaagttcaatatagctaccaactggataagtctgttcccaattaatagaatacccttccacataaagtgaagctaagtttgatacaatctccattagttcattctttttacgtcttatagaacaaaatacctcactttgtttatttaagtctgtaaaacaatcttgtatagaagtctttaatactggatgaggtccaacttctataaatgtatcatattcatcatcagctatatttgtaatagcctccttaaaccttacagtgtttctaacattagagcaccaataatccgcaccatactctgtacctaccattaacttacctgttacagttgaatatattggcgttttcgctttatttggttttatatctaataatgactcctttagtcctcctacaattttgtccatctcgtaactgtgatatgcagcatttacatttaaaaatttagcaaaaacctgctttttatcaagctcttcttttatactttctaggacttctctttttcctgataaagtaactgatttagaactattaataactgctatagacattccctgtttatatttttcaagtaagcttttagcctcttcttctgaaattcctgcagcaagcatagttccctttccttcagtttcattaatccatctacttctttcgattattaccttcattgcatcctcaaagctaaaaataccagcttcaaaagctgctgccacttcacctacactatgtcccacaattgcacttggaatgaccccaagagacttccatacttctgtaagtgctatctgcaaagcaaaatttgctggctgagcatacagtgtttctccaagtttagacttatcctcacttgccattaactccttaataagtgaccaaccagaatactccttaacaaacttgtcgcacttttcaattactcctctaaagattttattagtttctaaaagttgtcttcccattgcccaccagataggccccatacctgtatacacgaaaacagctttttcttttttatgagacagtttaccacctgtgaaaactccctctatatcttcttttctaataaagctatcaatcttttcacacaattcttcctttgtattaaatacaattgccatcctataattatgatgcgcacgtcttctagctgcggaatagcataaatcttctaaactatattcatcatctgccttacgtatatgcttcttatattttttaaccaattccattaaagccgtctcacttcttgctgatattgtaagaacatatggcagctctcttttagttacttcatttctattgctagctttattgtttttagagtaactactcatgactacgtgagcatttgtaccaccaaacccaaaacagtttattcctatgtaagatttacctctttttgaaggcagcttttctaactttgttggaacctttatacacatgctatcgaatggtatattaggatttggagtattgaaatttatacttggtggtatttgcttctttttaagcataagagatgctttaattgttgccgctactcctgctgccgactctaaatgtccaatatttgatttcatagaacctataaagcacttatctgtattacttctatcctttcccaaagctgccccaattgccttagcttctataggatcccctacacgagttcctgttccatgtgcttcaatgtatgaaatatctttagctgatatccccgcattttcatacacctcttccataagcttttcttgagcctcaccgtttggaactgttattccctttgtatgtccatcctgatttacagctgtagcctcaataacgcaatagatattatcgttatcctcaatagctttatccagaggctttaatactactattcctgctccttcccctcttgcataaccatttgccttagcatcaaaacttttgcaccttccatctggtgaaagaaatcctccttttgactctgctatggtatactgaggatttatcattatattaaccccacctgctatagccatagaacattcattattttctatagccttacaagcaagatgaagagaaaccaaagaacttgagcatgctgtatcaattgacatactcggtcctgtaaaattataaacatatgacaatctgtttgaaaccatagtcatcatatctcctgtggctgactgtgattcaagcaatggttgatttgccgaattaaactgcagcactttgtaatcaactgtaaacgctcctatataaactcctacatccttacctgcaagttttgttgtatcaataccagcatcctcaaaggcttcccaagaagtttcaagtaaaatcctctgctgtggatccatagatgaagcttctctaggcgttatgccaaaaaagccagcatcaaatttgtcaatattattcaaatatcccccacgaaaagcatgtgttttccctatagccgacctatctggattatagaacaaatcaatattccacctatcctttggaacatctatagtacaatcaaccccttttgcaagtatatcccacaacttttctttattatcagctccgcctggaagccttaatcccaagcctattatagctattttagccattctactcatcccctattgtcttttaattttgctacacgcagtctctttaaaatgctgcaactctttttaatatttataactttcctcctttaatttaagtctaagtgttaatcaaaaagtaactcaattatacacttaagtaaataaaattcttttattttaaaaatagtatcttttacaatataataccatgcaatatttctttttacaatcacaccttttttgcattttttgtaaattagttaacaataactaaacttttgatatgttaatttaacattttcatattcagcttagtttatattcgtaaattgattttagaacatatgtttgataagatttaagcaaggaggtaatagcatgaacttgtcctttaaaataaattcaatgtatatatgcgtacacaatatggatagagcaattaatttctacgaaaatttgttcaattgtaaagttactgggaaagatgaaatttatagcgtatttgatattaacggatttagatatggtttatttgcaaataaaaaaacaggagaaaagaaaatttggggaaataattgtctcccaagttttcaggttaatgatattgacttaattttagaaaagctgaaggagttgaattgcccaattgtttttcctcttactaatatagggaaaaataaagttttggaatttaccgactgtgaaggaaatgctattgaaataactagtcccataaagtgattattttatctatagaaagattgtacaaattaataacctatcttaagtatggtgcatttttagagcttagaaagtagcttgaaatttaattattacctttataaacataagtttcttaacatataagcttcctaattggttaagctattatagaactaagttgttagttcaatttaatcatattagaaaaggagaatacactatgaataataatttagaagaaacaaaaagattaaatgctaaatctgcttcacaaaaatcatttgcaagctctagttccttcaaaaatgctgcaagcacaaacagtagtgctttttctggttctaacagtttttcaaacagtgcatcagcatcagaccctaacctacaagaagctagaagattaaattctgaagctgctgccggaagatcttctatgagctctagcacaagcggatcaaataatagtttctctaatagtgccaattctgatcttgaagaaacaaaaagacttaacgctgaatctgctgcaaaagatcagccaataggctctggtatgagtggtactttttctaatattgccggatattcaagttcaaatagtgatcctgctagcaacgacttagctgaaactaaaaaattaaacgaacaatctcgtagaaataaacagtagtaataagtatatataaaacttttaagggtataaatagtttattacaatcaataactatttatacccttttactttatataatttcttaaaaatcctaaaattattttattttaattataaataattgcttacaactatgtgaatagctgagttcctaaatctgttttttatattaacacagtacttttttgaatattcatcaacaatataatttctatataattcttctgtaagctttgttttaccaataatcataagtgatctagtatttaaatttttaaaattttctgctagccgcctatgctggtcttcatcaaaacctccacctaattgaatgttaccgtaatcattaaaaacacaatcatatggtggatctaggaacattatatccttagagctagcttttttaaatacctcctcataatccaaattaagtatttgtgcatttttaagcagctcataatgtttaatgtctattccctttgcattaaaccccttgtatcttccaaaagggacattgtattcgccctttttgttgtatctaatcattcctgaataggaggttttattaataaaatagtacactgttcctcttaaatacttcccggttgggtagttaaattcctctctcagctcataatacaacttctcattcatacttaaaactctttcttcagaattaatcattttcaatgcatcatattgttgctgatttttattgtacacattctccaaaaattcaagttcattttttatcctactgaaattgttttttacatccacataaaaatctattaatttagtatttatatcatttataattgcattttggggctctaaatcaaaatataccgctccaccaccaataaatggttcataatagctatcatatttttgacttttcaagtgatgtataaatttttttatttctctcgcctttccacccctatatttaatcattgttctcatattccctatttacccatacctttcataaatcctgtctaataaatttatataatctcaataaataaaaataaccctatccatatgttttttaattttctttcataattatgaccatatgattatgaattccatgtaagtaatggaattatccacctcctcataaaatatataattatatttacttttatcgaatggaacataacttttaaatacccctcacattaccactttacgtactttacacttctatttgaaaaatagcccaaaatatatgttccagtatatttatattattgattattatgtatttaaccgtaaaaaataggcatagaatatcaacatgacattctatgcctattttttatgttattttttacctatttccagcttatatccgcttcttttctaggtgtagttctagcatatgttacattagggtatcccattaccatacaagttactgcttgtttaccttcatgtattcctaaaaactcttgaatttccttactattttgtgctgctactatgaaaaatccactaaagaatgttccaagccctagagcatctgtcataagctccatatttgaagaagcaagtgctccattaacttgtgaagctgcagtaacaactataacagctggagcattaaagaataatctgtcattctttacgggatcttctttgtatgcttcatacatcttaagccacatctctgcatatctttttgttaaagcatttccgttctttgaatccttaagcatattttgtccaatatttttaagactttcaaatactaaatcctttagctcatttatcttatccttaacaactatataggaaacatcctgcatattacttcctgtttgagtaaatcttcctgcttcaataatcttttctattttctctttttctatatccttatctttatattgtcttatagttcttctaaactttataaagttcattaatttatcagcatctacagaaaactcttctttattgtattcttttacttcactcatatcataatcatctgttgatactgcattcataggacagactgcaatacagtgcccacattttatacaagtttcattgtttatctttgccttaccgtctactatttctatatcctttggaaaacaatcctttacgcatttcccgcatcctatgcacttttcaatatctactgtcatcataatatcaatctccttattcaatatattttgacataaccataaataaaatttataatagttataaatagctctgtaaatataatctataatatatttaatagcatactcttaaaattgtttactttcctagtattaaagcccgtttatcaatatatcagaactattcttcgttataattataacattgaacaatttattgtgtccaattaatattattcacaatttaataaccaaaagttatttaaggagatagaatatgaatttacagcaattagaatatctaagaaaaatagcagaaacacaaaactttacaaaagcagctgaagagtgttcagtgactcagccagctctaagcaaagccatttcaaagctagaggatgaattaaatacacctctctttaaacgaaacggtagaaatattgaactaacaacttttggaaaagtatttttaaaacattcaaacatagccttaacagaaataaaaaagggtattaacgaacttcaggaaatgcttaacccaaataaatcgacaatatctatagcatcaactcactgcataggatcatatttcataccttttttaataggcaactttttaaatgagcataaagatataaaatttgaattttgccataaagctacgcctgaaatacttagggatttacaatacggaaagatatccttaggcttttatgatgatccaaattatatcaataagtttagagaaattaaatctgtaccagtatcaaaggaagagtacgttcttattgtgccaaaaaaacatcctctttcagataaaacagaggtttctcttaaaactttaaaggacgaatcctttattgtactcaatgatagcacaaaggataatttactttcttactctgaatttataaatcatactacagaaatttccgtacaacctaatgaagtatctatgcttggtggtttagttgcggcaggtgcaggtataacaatagttccaaatacaccccttattaatacaaatgcagtttctattattaaaataaaagaagatttaggctataagactatttatatgggttggttagaggactcctacatatcacctcatatagataaattcattaattacgtattagaaaatcagtctatatagatttttttataacttactgaattgtgatttttattattataatccatcttcataaccccttttaaatttgcaataaattcacgggatgctcttgtaaggtactcccctttcctatatgcaactaccaatgtatgctcgaggctatctattataaaatcattctcttttccatttgtgttcaaaagatataacacattctctggaacaatagtaaaacccattcctgatgacgccatacgatacgctgcatctaaatttgtaatttcgagaattatatttggtttagctcctattctcgaaaatatatcatccactataagccttattctctgtcctttttttagtagtataaacttctcatttctaataaaattaaagctaatccttccatcaacactacatataggatgtttcttaggcgctataagaaaaattctctcattcataatagactcatatgtaattttttcatgctgcactggaagcgttaatattgcaatatctatttttccttctaatagcattttctctaactcagacactatattttcttcaacaattatctctatgttagggtactctttataaaatttaggtattacaagaggcaatatgtatctacccgcttgacttggaaccccaattataacacgacctttactcaaattcgctatatcatttaactcctttgtgagctgattatttaaattaattatatttcttgcagtttcaatatatttctctcctgcaaaggttaaagtaatagttgctgaagttctatcaaataattttactcctaggctattttctaatcttattatatattgactcagggatggttgtgatatataaagtctttctgccgctctagagatgcttttttcctccgctatggtctttacatattcaaattgacgaaaatccaatgtttttcccccttttaatctatttttcacttaatatagttttatcctatgaactatataatattaatagtattatacacttaattaaaatgaaaatataatataaatgttcattaacaaaagatttacacttaaatacgaagggaagttatcagaacttgtctacaaaagatattgatatattgcaaaaaaacaaaataagtattcctagctttgcttgtgaatctctaacacttggtgcgctattaactgtagttggtggtttcttagatgcctatacctttataggccgtggtggtgtttttgccaatgcccaaactgcaaacattgttcttcttggtataaatacctttaaaggcgaatttaaaaagtcactaatttatcttttacctattatagcctttattttaggagtttttgctgctgaaataataaaaaaaagttcatcgctaccgtttataccaaactggcagagatcaattttaatacttgaaataatcatactttttataattggctttatacctaactccgtttctaattctattataaatatcacagtttcctttgttgcatctctccaatactgttcctttaaaaagcttggaaactcaacctatgcaactacaatgtgtacaggaaacttacgttcagcttcacttttggcctacactgcattttcaaaaagggacaaagaagctgccgtaaaatcaattcgatattttgctattatttttgcttttatatgcggggtatctgttggtggttttttaactttatttacaggtgtccatgcagtatggttggtagatatattactacttataatacttatattgatggatttaaaatgaaaacaaggggttatcgcaataattttttagtgcgacagcccctaaattttattctctgaacactatataagctatgtaattaagagtttcatagtaaccgttataaaacaaactatttcttataatagtctttctcaaattctatgccatcaaaagtttgaatctttggcctttgttctacataatgcagttcattatatatcttatgaaattcttgaggaacgtttttatctatactataaaaagaatcattataagaaattttatcaccaaatatacttatagaaagatcatctttattattattgaccatagttatagaaaatgcccatcccttaacatgcggattaggaattttcttaatttttatagatgtaaaaaatttctttattctttttatatcatcactggaagtaactctcttctccattactggattaccagttctaataatttttatatacttacatgaataatttaataaggacatatttctattagaatcaggtttactaatcttaactttcctatttttaaaaaccctcataccaaataaaataactcctatcaatataaaaattaagactacaaataagattttttttaatctacctctaaacataaactattttttatattatatataaactacataatccgaccaagctttacttacaaacgctgtattatttcctcgactacttataactctataaaataaaggcataactgtaattttgtgttcaacaaaaatttctataatagtatcaaagaaagatttttctggtttactatgaaaataatcgtcttcaaaaatttttgagttttcttttttgtttctctcaattttattttcccattccgttatactcaagtttttcaatgcaattttatgattcctccatactaatttaaacggagcacaggctttaaatcctccagttaaacaatctaaaatatttagctcatcagttccatagtatccaccaggaccattgattgcttcacctaatgcacagaaaaaagattcataagtggtgatattattcccatctaaataatatgtttcataactaacattttcatatggttcataataagatcgtttataactaaaatgatatattttaactatattcaaccatgcctctttgttttcatcacttagttttatccattcatttttttggtttggtttacctgttctccacttatcccaaatttctatttcatctccagcagtaatactatttagaactacaatcagagatagttttgcatcatttttaattttttctagttcattatgttttatttcttcaattatgctgaattgatattcacctattgatattccttgaaaatctagtacatctaaagtacatggtcctataatagtagccttacttttttttaagtattttaggtattcatcacatacttgaaaatcaataagttctaatttatgatatcttacattatcattatttaaaatagaatcgccatttaacccaattatattttggcagtagcctactaattcatcatcacaacttaatgaaaatttatatttcatgttatcactcctattgtaaatataattacattaattatttaccgccatccggaaaccatgggccaggaaaaatctttattctattataattatgattttctacataacccattttaataatattttttgaactatcatgcaatactaaaatcatattattggtttctatgggtttccctttagaatcataaacaacagtaccatctttatttttttcgtcaatttaccacttatatcttatttaaaatgctttttattttattatatacacttatttatatttctctaaaataatcatcatgatattctccatctaaaccataaataacttcatattcagcaaactcatcatcattgtattctaatcgtattttaacagatatgtatttatatgtaccatcattggtatcataattttgccatgtatttattacataagctacactgtgaaaaattattttaatatccttttcttttttatcaccaaatacctcattataatcttcaggttcttcctctttgtaataaaatatataatttttatagttttttaaaaccatttctttcacatcatgttcagataaccattcttctaaattcatatattagcctccctaatgcattccttttctaaagtaatcaaatataatttcaccattactattcttataacctaaaattcgataatctccatactctttattttttacttttatttcatatgtatatattttatctccttttttcattcctggaccttttagtttcttaattccattttgaccttctgcacctactatacccttatttttagctttttcaaaagcttcaatgcctttttgtccccattttttctttatatcttttatagcctttggagtaatttcgctaggattattatagcccttttccatcttactaagataaaagctccccttagcaaaatcactaccaaaatgtgaaagagaagagcctatcattccaacaccgtgtgcagctaccgcaacaccaacactttctactgctggtactgccggcgcagcagctccatcggtagctaatgttagtgctcctgcaccaaatcctcctacccccataatggacagtccaccaaaaagctctaatgttccttgtacttcaccttctaaatctccagccattttaccgtactgatatgctgctaaaactccatacctgttttcattctctaacttatatattaatcttttatcattatatacgcctaataaaccaggcaaaccaagtgctaaattattggcaacagaaactgccgcacctaattcaaaatatcctataccacttcctaccttacttgcatatcctacagcctttttcatattacttatagtttcttttgaatcagtaacttttgagaatttctcttctcctctaattatagtatttaattttataccattgccactatccttatctgcttttattatagcatcttttgccttacttaattgtattgataatttatatagcgtttctgttacttctttacccgattttaagacatcatctatattcctttgtatttctattgatgaagctcctacatatacatttttaactccattttgtgcttgtcttaatctatttatcgcagtagttgacatatcccccatttgcttaaatttagatatcatggagtccataatacgcacttccatctttattttgtccgccaatttaccacttcttccttagtataactcatttttttataatactatttttagtaaattatatcaactattttaattattattttaatctaattaacaaacatcccttaaattttaactattataatgcaaaaattacgataataaaaagtagctataggcaacaaaacaacatattgaattacggcatagtataatttatacaattgacaatgccgtagcattaaaaatatgctacggcatcgtccttttgttttatatattatttttaactctcatctttttattctccagcattagagctgctataaaacccaccaatgctattattcctgcagcaataaacatgtttttataacctgagcttatggtactctgaaaggtactttcaattactgctcttttttggtcaatcttattcaaataatccgccttccaactagaaaacactttatttaaatctatatgtggcgccattttagaagtaggccccatctgccttaaaatttgcgcctttattccaggaagcattttatcaattatgcttgctgcaaactcctttagcacctttactatattagttacatccgctgactgaaactttgatatagctgcatttgaaatcttcccactgcctgataatttagatatatcaattgtccttacagcactcttaccttgtaaaaaaactggaaccgaaatttgcggcatcaccgacataatatttccttgaactcttttacctgcttctgatataaaatttatcattatattcggagaaactgctacaccgattgatcttataagtgataaagttgaaagagccgatgcagattccttctcatccacaaatgataacatcaaatagttgagtggagttcccattgtaaagcccattccgaaacctacaaacacaagtcctatcataatagaaataaaatttggatttgaggttgtataaaaagctaagaaaaaggttccaaaaactgtacaaatcattccaagagctgtaacaagtttagctgaatacttatctataaatttgcccccaagtggagcgcttactccagcgaaaacagacatgaaggttactaaatatcctccatttcccgtcttcaatttcaatatattttcagcaaactggggaatgaatataactgccataagtcctactcccgttataaaaccaagtattaaagttaaaagtatttgtttttctttaaaatatcttaaattcaggattggatcttctgcttttttctctataactataaatatgggtaaagtaataaaaaatactattaagaagggatacactactgaacttcgtaagctcttaacaatatctgaaaagttcaagttagtcaaagcatacataagacttaaaatcatggcactcagcacaatgcttccttttaaatccatcttcttttttgcctctccaagattctcttttaaattaacactcagcgctaagataattaagcttataggaaggtttataaagaatatccaaccccaatggttattccctgctaaattcaaaacagaagatcccattgtaggtcctaaaatagttgcaattccgtaaatgcctcctacaaaacctagtgcagtacctcttttttcaggcggaaagctgactcctataaatgcattagctataggcataatccctccaccaccgatagcttgaattactctagctactagaaaaaatgtgtagttgccataaaagtttgaaaccccacaaaggaaagaccctaaagcaaaggttgctatactaataacatagactttcttccttccatatctatcagaaagcttactaactattggcatagatacagcataagctaaagtgtatattgtcaccatccagacactaagactttcacctattccaaagctgcttcttataacatctctggcaggcgatacaattccgctatctatcgcacccataaaaatccccaataaaaagattgctaatgcaataattctttttttgtctttactcataatattcccctttctgaacattgttcatttagatttaaaaaaaattatatcttcatatgttcatataattcatcaaatgttatatatttattcttgcttaagtatataagattagaaactacaaagtgtgtaagtttttcagatgaaagttcagattttatattacccctacttctttctaccttaagtatctcttccactttaatataaatatcttttatatctgaactggcctcacttttatatccctccagcattgcaatttcataaaagatagatatatacctatgcacaaatccttctatagctaggtatacctttcttatcttttcttttaattcttcctttgaatctgtaagtgcttctagggatcttatagttgctttccaatcatccttaaaaatttcacctacaaaatcctctttgcttttaaaataattataaaaagtacctattgctatatctgaattttttgctattgttcttatacttagttctctatagcttttttccataagtgtttttctaccctctaatataagtttttctcttatattttcaattatcttaggcattttgtcatcccccaactttatgaaccatgttcatattgtactttattttacaattaattgtcaattaaaaatttaccaaaacagtaattcacctattacacttttatgtatttaatttccttaagatatcttatctatacagtccttaagccactccacataggtctttctctcataaccgctccatttaaaacaatgtagtcgccaaactctggagaatgaaccttagatacgtctttttcacttaaaagcatctccatacactcctcaagatgttctaatttttctgtgtgtttttccaatgcaattttaaactgcctaagtagtgtttcatcatccatctcatcacaaaaatacgcctttagtctaaaaatatccttaggtgtaggttccagaggttcatccttttttagccacttttgtaaagcctctttcccattttccgttatggtatataattttttttctaatttttccccttgtataacggttttatatgaaattagcccctcatctgttaacttttttagctcaggataaatttgactgtgtttagcataccaaaactctactaaaccagaattaaattcctttgctatatcatatcctgttagtggttttctatttattaatcctaaaattgcatattttaaatttctcacttaattgcacctcattcttttttataagctttactacactatgtttactttaattacttcccaaatttaaaaattatattaacgttacttaacattctatcatcattggatgcagaataaaatatcttataaatataaacatgtatacattgacatatttctctaaacaatattataatatatacgaaatataaagtattataaaaaaatttgtctaatatttaacaatgttattgaggagggtacttatgaacaaatacaagaaattatttgaaccaatcaaaattggaaaatgtgaaatcaaaaaccgttttgcattagctccaatgggccctttaggactagctgatagtgaaggtggtttcaaccaaagaggaatagactactatactgaaagagcaaaaggtggcacaggattaataataacaggagttacctttgtagataatgaagttgaagaacacggaatgcctaattgtccttgtccaacacataatccagttcaattcgtaagaactggtagagaaatgactgaaagaatacacgcatacaattctaaagtatttttacaaatgtcaggtggatttggtagagttactatacctactaacttaggagaatttcctccagttgccccatctccaattcaacatagatggcttgacaaaacttgtcgtgaacttacagtagatgaaattaaatcaatagttaaaaaatttggtgaaggagcttttaatgctaaaagggccggctttgatggagttcaaattcatgctgttcatgaaggataccttatagatcaatttgctatttcattatttaatcatagaaccgatgaatacggcggaagcttagaaaatagacttcgctttgcaagagaaatcgttgaagaaattaaaaatcgctgtggagaagatttccctgtaacacttagatattcaccaaaaagctttattaaagatcttagagatggagcacttcctggtgaagaattcgttgaaaagggaagagaccttgacgaaggtgttgaggctgcaaaacttcttgtatcttatggatatgatgctttagatacagatgttggttcttatgattcatggtggtggagtcatccgcctatgtaccaggaaaaaggcttatatagaaaatacgctaaattaatgaaggatactgttgatgttccagttatttgcgctggaagaatggatgatcctgatatggccttagaagctgtagaaaatggaacctgcgatgttataagtctaggaagacctcttcttgcagaccctgactacgtaaataagttaagaagtaataaatgcaaatcaataagaccttgtatttcctgtcaagaaggttgtatgggacgtgttcaacattactcaatgttaaactgcgctgtaaaccctcaagcttgtaaggaaagagctaactcacttactccaataattaaaagcaaaaaagtattaatagttggaggaggagttgctggctgtgaagctgctagagttctagctcttagaggtcatgaacctgtactttatgaaaagagcaatagattaggcggaaatcttatacctggtggagcaccaagctttaaagaagatgacatagcattagctgattggtatacaaataccttaaaagagctaaacgttgaagtcaacttaaatagcgaggttacaaaagaacaaattttaaattccaagtttgatacagtaatcgtagcaacaggatcaactccaaaggttttcccacttggagatgacgaaaaagtattcaccgctgctgaagtattactaggacaaaaagatcctggagaaacaactgttgtagttggaggaggtctagtaggctgcgaattagcattagatcttgctaaaaaaggcaaaaaggtaactattgttgaagccttaaataaaatactagctttaaatggtcctttatgttctgcaaacagcgaaatgcttcaaaaattaataccttttaatggcatcgatgtaaaggcaaattcaaaagtaaaaggatacaaaaatggattgcttaaaatggaaacagaaaacggaatagaagaattaccatgtgattcagtaatattatctgttggatataaagaagaaaactccttatacaaggaattagaatttgaaattccagaaatctaccttctaggagatgctcgtaaggtatctaatatcatgtatggtatttgggatgcttttgaagttgcaaaccatatataaatagtaaaaaaccccgaaaggggtttttttattgatattaattaaactaagaataaaaagtctaacactgctaaataataattgtatacataactttaaaggagataaaaatggaactcaacttaatattcaaaacaattattctctttttagcaggaactttcattttaagaatagctggaagaaaatctatatctcaaatgactatggctcaaaccattgtaatgatttctttaggtgctcttttagtaggacctatagtcagcaaaagtcttattgtaacaattcttatagcttgtcttcttggcctattaatgatagccacagaatacattcaaatgaaatcagactttctagaaaacctatttagtgggaaatcagtcatggtaattgagaacggaaaagtcaatctagtaaaattaagaaaattaagaatgtctctagataaactagaaatgcgtctacgggaagctggcatatcttccatagaggatttaaaatatgcaacaattgagctagatggtcaactaggatatgaattgaaggatgaaaaaaagcccttaacaaaggaagattttaatcttatgatgtcagaaatatctaacatgaaaaaatcactgaaatatggcataaatcctagcaatctccccaaaaatgatatatttgaggaagtcaaaactaataaatttgaaggtgatgacaaagaaccaagttaaaaacagagcacaaacaatgtactctgtttttttatatacttaaataaccttccaatcatcatttcccttaagaatattggttatggaatacttttctacttccttgtcatttaaaagtttcgcccatttaactcttttatcatttgctgcacctggaccatagcttttatactctgcatagtagctttctttttcagcatttgccttattccaattatgaaaaccttctggaatgatgtgttctcccataaaacaccttatgaaaactgtttttgcatagtctctccaaggtcttcctaaataaacagtatgcttccttgcatcacttatgaatttgcaatccaagaatacatatccaaattcttttccttctggcgttgaggctgctgctataaacccattaacctctttatttttatcattagaaaaaatctcacatttattgaatacagcagtggcggaaccaaatataaagtctatatctcctcttatataacaattttcataatactgccttacatctcttcttttcataccgtcctttggcccaccaaaattgtttccctctataggctttggaggaagtggtcctgtaaatagggtatcttggtttgctaataatctacagtttctaaaaatcattctatcgccatcagcataaaccgcaactgcttgtcctactagatctccgtctcctgcattattttctacagttatattttcacaaataaaatcatcgccatccacaaacattgtataggagttaaaagttctcattctctctttattagccatcaaggtattagctgaatcattaaaggttatgaccgtgctacttacatcttcaccaattagacttataaaaggttttcttatacttagtttttccttgtaaactccagctttaacctttataataacccttttcttattgttcttagacacactgtccactgctttttgtattgtatcaaaatccccatcatcatttttcgatactatcaaaataaacaccccttttaatttttcacctgctgcaaaatcactgttctcttataaaaaccatatctcttataaaactccagaactttctcatttccctctgctactcctattattttattatctgctccatttttatctaaccatttaagtgctctagtcattaatttatcacctaatccaaagcctctgcactctttttcaatgaaaatagactcaatctctcccaagtttttattttttatagtacttatgcagtaacctacatattcatcatttcttttaattaaatcaatattcaatgatttagtatctttatttgtaaagctcttacgtctatcttcaaatttaaatttttcatatctagcataaaaatacttggaaccacatttatggtgctcatttaacttttcccataaaggctttactaactctaataattccgcatctccatttacaaattgaaactcctccataatcaattcacatcctaaaataataataccttaattatacattaataccattttaattgtccattattgttattatttatacagcataaataataacaatactcaaatactaaactcattagctaaatctttgctttacacttaatttatgaggagatgttttaaatgaaagccataacttttgaaggcatgaacaatgttaaggttaaaaatgtaaatgacccgaatatcataaaaaatgatgatgcaattattaaaataacttctactacaatatgtggttccgaccttcatcttcttcgtggaaccatgccaaaagttcctcatggatttattataggccatgaagcaatgggaattgttgaagaaacaggaaaggaagtcacaaacttaaaaaaaggtgatagagtaattgtgccttttcctgtttcctgcggtcactgctggtactgtactcacggtctttctagccaatgcgataactcaaacgagcatggtgaagttggtgctatatatggatacggtgatttaatgggaggctacgatggcggtcaggctgaatacttaagagttccatatgcaaactttgggcctaaattagtacctgaaaatcttacagatgaacaggttctttttctaactgatatacttccaacttcttattggggcacaatagtaaatggaggagttaagcaaggtgacaccgtagtcgttcttggctgtggtccagttggacttttagctcaaaaatgggcagcttatgcaggtgcttctagaataatcgcagtagataacatagactatagattagagcatgcaaaaaaatacaactcagcagaaatattaaacttcaatgactacgacaatacaggagaatacatcaaagaaataactcatggaggagcagacgttgtaattgactgtgttggaatggacggagaaaggtctcctattgaaaatgtagaaactctattaaaaatacagggtggttcaaagtccgcaatagaaatatcaactcaagcagtaagaagaggtggaacagtatctgttgtcggcgtttacggtgcaagatacaataactttccttttggagacttcttctctagaaatataaccataaaaactggtcaatgcccagcacattcttatgtagatgttattttagatctcataaagcaaaataaatttgatgctactgatataataactcatactatgtctctttctgatggtgaaaaagcatataatttattcaataataaacttgataattgtataaaagtcatattaaaaccataaaatctttatataaatacggagttttggtaacaaacatacatgccaaaacccccttaacttataaattcttgccttttatgaaatcttctctatgaggtgtaaacacatccaagagcactccctttttaagacatttacagccatgtactatattcggtaatttaaaaagtgtgtctccttttttcactactttcttaattccatcaatttgaaattcaaattctccttctaatacgtatgaaagctgtgtatgaggatgattatgtagttctcctacagctccctcttcaaaatgcacctcaacagccataagttcttcaccaaatgctaatatctttctttttatcccttctcctgctggttcaaattctctttctttgccgtatacaaaagcctcattcataatgttcaatcctccccttaaatatttcatacttgtctctctacataacattttagcacaaactttcctaatttctatgtaaataaaataagggagttttattataataatttctccataatgaattttaatttagtatagaacattttacatatttctcttgaagatttttcttttaatactataattagtatagtgatttaatgatcttataaaatacaattagaaggtgaatcttttgaataaaccaaatgaaagaaaaaaaatattaattaaacgttccattttagtaggctgcactgctattatatgttggacttgcttttttatatttggaacatattatagaaaaaaaactactgcagctgcaaatgaattcaaaaataaagctgctctttctaaaaaagtacatcataattcaaaagcagacaagttagctaaaaaagctccaataattcctggataccttgaaccgtggaagcttcaaaaaaacaatcctaaaaaaacagcatatttaacctttgatgatggcccatctcctaatactacaaaaatattggatatattaaatgctaataaaatcaaagccacattttttattcttggtaaaaacgcagaaatgcatcctgacttggtaaagttagaatataaatatggaaattctataggtaaccatacttattctcacaatatacgttataatgaatcaactgatgaatttttagctgatgttaacagatgcgattctgttttaaaatcaattttaggtgataaatatactccaaagctacttagatttcctggaggttctggcgcaccaagagagactagattggctccttttaggcaagctgtaacaaatgcaggatatagatatctagattggaatgatgaaactggcgatgctgaatataggcttgctcctgttcctacgttaatgtcaaacctggaacataatacaggtaatcagcataccgtagttgttttaatgcatgatgccgctgcaaaaaccacctcagtagacgcactaccacaggtaattcaatacttgaaaaacttaggttatacttttgataaaatctcgtaattatataaagaaaaagcaagagaactctcttgctttttctttatatagcttcatatcctatggcaatttatttcctgctgctctatatatttcgtaccattccttccttgtaagctctatatctgaagctttgcaaatatccttcaaacgattaacgttcgttgtaccaactattggctgcattttagccggatgccttaaaagccaagcaattgctatagccgtattcttaacacctttatctcttgctatgttatttattactttatttaattctggaaatttatcgttatccaaaaataccccttcaaaaaagccatactggaagggtgaccaaggctgaattgttatatcgttcaatctgcaataatccagaacacttccatcacaattaattgaagcctcatttttcatatttacgtttagtcctgcatcaatcattcccgtatgcattatactaagctgaagttgatttattattatcttattatttaaatatttacttagaagctcaatttgcataggattttgattactaactccaaagtgcctaacctttccactcgagcttaacgtctcaaatgcttctgcaacctcctcaggctccattaatgcatcaggacggtgaagaagtaaaacatctaagtattcagttttaagtctttttaaactttgatctactgaatttaaaatatgctcctttgaaaaatcaaaaaatccttttcttatgccgcattttgattgtattataagcttctctctaacactaggtttcatatcaattgcttccgaaaaaatttcctcacatctaccgccaccatatatatcagcatgatcaaagaaattaattccttcttcaagtgcagtactaataagtttactagcatcacttacagtaagttcgctaagcctcatacacccaagagaaatctcagatacattagaaagctctcctttacctatgtttaaagttttcattaataaacaccccttttgactatataatctaataaaaccatccagctaccctctccttttaatataccctaacatttaatattcccttaataaagccttaactttaatttagtaatataaacttaaaacaagcatcataaaaaggaaggtgaagcacatggaacaactaaacatttgtattgacattgatggaactattacagacgcttattattggattgatttatgtaatagttattttaaaactagcatcacagaaaaggacgcaactcagtattatatacacaaaatactaaatgtaccattagaagaatataatgagttctatgagaagtataaatataaacttcacagcgaacaaaagcttcgaaaagatgtaaagtccgtaataacaaaactcagccaaaataataatatcttttttgtaactgcaagagaacgggatcttactattctgacctatagttacttaagaaaaaaagaaattccttacgatagcctgtttattctgggcactcatcataaagttccaacagctagacagctaaactgtgatttatttatagaagataactacgacaatgctcttgagctttcaaaagctggtttcaaagtacttttaatagatacctactataatagaaaaccattaaatcaaaatattataagattttataattgggacgaagtatacggtattgtagatagactcttcgaaaaatcagaggctatataaactactgatacctctctacaaagtcagtccagcttttttctttagctgaaatgggttttccatgtgaaggacaaatccattcaaactttaacttttttaaagccttaattgattttactatctcttcttcactatagttcataaatcttggaagtaattttatggacttatcctttactttaaacaaatctccactaaataatacattttcatataatactgacacatgaccaggagtatgccctggtgtttttattatatatgctttagaaaacttctgtccctcttcatatgtatttatatcacttaatgcctcttgtcttattaatgtctgaattattctcttaacaccttttctttttaattttccacaagcatacggcatatcctcttttgatatccacagttttgctcctgaagccttctgaagcattttagcatttccaatgtgatctatatcatggtgtgtaagtaaaatgttattaatgtcttttatgtttaaatctacagaattaagctctgattctattttcttaaataatcctaccattccagtatcaataagtatattatttccattttgctttatcaaataaacgtgactgctatttgtaccatcaagcatataaacattatttattatttccttcattttacttcctccaaaatttaatactttaaatacattataacctatgtataataattggagcttccatggaaattatgttttaccctggaagctccttatataaattaaatatggtataagcgtatgttatttttctatcgaggcaaaattggatatacataactaattttaagtaaatgcatttactacccttttatcgttacataaaaatgaaacttaataattattttacattaaatacatttttttacttaaatatttttaaaaaagagactttatctcaagcctctatttttgacaaagcagttcatttaattgtcctaggaggttatttcctcctgaaagagatatgcttcctaccttatcacatattctttctaagtattccatttccttaagcttatacagcgtttcattttcatctaaaagtttagccgtatttaataaactcctagtagatgctacttcttcacgtcttgatataacattagcctgtgctttcttttcagctattaaaacggtgttcattatatccctcacttctcctggaagtattatatcctttataccagcacctatgaactccacgtaatactctctttctttttccttaagccttgaaagtataaatcctccaatttcctctttttgatttagtatatcatcgaatttaaatttcccaatatactctcttattaccatctgtgaaaaggtataaagttgagttgcataatcctttattttagaagtaatacttacagcatccaccactctaaaatcacacacaaaattaatgcgcagagaaactctatccgttgttaaaatttcttgtcccaatacctcaagcttctgaacccttatatccacaagctgatacgtgaccttaatacagctgttccagaaataatatactccacttgaaagttctttgtgaaatttaccattaaaatacactactgctctttggccctctgaaacttcaatctttgtgtacaagcttactggcatatatttaaataagcttctatcaatactctcttgaacctctggttttgaaatatcaataagctcaaaggtatgcttttttataatgttccaataagcatactcaccactcactaaaacatttaattttctgccatttacgtagtgtacggcaagcttgccatctggtatatctatcttaaccacgctttttttaaaattctcatcctttaaaaaaatatccatatccgatgtagatatttctttcatgctatctacattcacctttttaatctcataattcccccatatatacgaatgcttacctggatttagtagctttatgaatattccatccttaaacaggtatcctctttcattttcttttataataatcttcatagttcttcattccttattaataaaattttgataataatagcagtattcacatagctaccgcgggaatatagttaagttaatattaatttatctcggttcctctagaggcgtggagataaaaaatacaaaacggtatccctaaattcacaaggctgtaactatgttgttatataaagtctagtccttctcttaattgcaacacgaatactgctcttagtatctttaaaaaaagacttggaaggtcttctatagagaggttttaattcctcatttaaatctgtaattgctctaccagctgagctaactgagtcacctcagtaagagatttgaactcctgacacattaccctgacattattttggcatactaatatggcactgcccttagcaccgcaaagcccttaaagcttctgcaaaaaataacgcctttatataaaaagccttagcttatatatacttaccccttaaccactccaattgttttaagcttttttatcggcttaactaaatcagtttgattaagcataacttcatctatgtttttataggcaaatctactttcttctggaatgtctttcttttttccttttcctaaaataacatttctagtcttaagatccttcattacctcttctactgtaaagttattcattgcagcttttcttgaatatcttctacctgcaccatgagaagaagaacagaagctttccttattacctttaccttctacaacataactaaaagaacccatagctcctggtattacagcaagctctccctctcttgcacttgttgcaccttttctatggacccatacattttttccatagtgattttcaagcctagcatagttatgatgacaattaatttcttctgtatactctatatttaaatcagtgtacttattaagccacttttctattatgcttttaacattgtccatcattttagctctattttcataagcaaaatcaagagccaagttcatccagtttatatacctttttcccttatccgtatcagtaggcaaaaaagctagtctgaattcttgaggtacggaagatttccacttttcatttagctctcttgcaatgttattaaagtaatcacaaacttgttttccaaaattacggcttccagaatgaatcattatgcaaagcttacctaattcatcttcttgaagctcaataaagtgatttcccccgccaagagttcctgcttgaaagtaccctccttcaatttgctctaatagctgagtgtctttttcatacttattgatttcctctttagccttatctaaggtgatacacgcttgtgcttccctatgatgtttaaaggaaacaggtatatttcttagtatatctccaaccattccttgaattagagatccatttgaagtcttaatatcttttatttctgatatgtttatgttggttgctacaaaatccattccacaacctatatctacacctactgcatttggaattataacgccttcagttgcaataactccacctattggcattccctttcccgtatgtgtgtctggcataagggatacccatttatgtataaaaggaagctgtgataagttatatgcctgcataagacagctttcctctatatcctcttcatccttaagccatatccttattggtttttttgttttttcactgcaaataacaaacatataatcactccttttttgttgcttgtcttgctacgctttatatcttagcatgattataaaaagctttcatttaaaaaaagttgcgaacttaattctttagattagcttataacataattacttgtttgttgcttttacttttataaattgttaaaataatcttattaattagcaaaggttgtgattattatgatggaaaatttaatggtgagagaagtttagtatgaatattaaatgttctctcaataggttactttatataaacaaggagagaatattattatgtataaaatcttaagaaccgaaaaatcctggattgaaggttctgctgttgagcaggtaaagaaactagctagtttaaaaggtgtagaaaatgttataggctatcctgaccttcaccctggaaaaacacccataggtatttcaattattacaaaggatgttatatatcctcatcttataggaaatgatattggatgttccataagcttgtttgaaacctctgaacttaaaagaaaattcaaagtagaaaaggtaatgaaaacccttcaaaatagtgatcttaaaaacgaaattaaaaaagattttaatcttggaactataggtggaggaaatcactttgcagagtttacccttgtagataaaattcttgatgaaagtgaaacaacaaattttgataaaaacaaagtctatcttcttgtacacagtggcagcagagggcttggtgaagaaattttaaggaaatatatagattattattcctgtcaaaatggacttgcagtaaacagcgagggttttaataactatatttcagactataaaaaggctgtagttttcgcaaaagaaaatagacagcttatagcaaaaaatctatgccaattattaaacttaaaagcttttgacctaaaaatagaggctatacacaatggtttagaattaagagaagattatataattcacagaaaaggtgctgctacagctcttaataaatatgtagttatagctggctctagaggtgattattcatatatagttaagcctataaactcttcccttgaaacaggcttttcaatagctcacggtgcaggcagaaagtggaaaagaagtggttgtaaagaaaagctccaaggcaaattttcaaagaaagctatacgaaacagaagcttttcctataatcttatttgcagtaacacaaatttagtatacgaggaagctccagaggcttacaaaaacatagatagagtaatagatgatcttttatcctttaatttaataaaggtagttgcaaggctaaagcctttaattacctataaggattaggtatgtggctacaaattagtgcaggcacagggcctgttgaaagctgtagattcgtatacttatttttaaacttagtaaaaaaagaatgcaaatatagaaatataaaaattgaagttttagactttgtacctggtgaaaaaatcggcactcttaaatctgtatttttaaagcttagtggagaaggtgctaagacgtatgctagctcaattacgggaactcatcttcttatttgggaaagcgaatacagaaaaaatcacaggagaaaaaattggtttatagctgttaattcttttagttatgaaactaacgaggacctaaacgataaggatattattattgaaaaaatgcgaagcagtggtaaaggtggacaacacgttaacaaaactgaaaccgctgtaagaataactcataaaaagaccggtatagttgtgaactcaagcgaagaaagaagtcagtttgcaaatataaaacttgcaaaggctagattaatcattgaacttaagaaattatcagatgagaggcgcaaaagaaatcgcagtgaaagatggactgctggaataaatatagttcgtggcaatccagttaacgtatatacttacaaggaactaaattcttagatttaatcatggggcttgcagcttttgcaatgccccattttatagtgtgaggtaaacatatgaaaaatttttctgaaacaattaagaactttgataaaataagagactatgtaagagacttttatatatacggctttaaatccagaaatgactttactagaaaaagccttagaacctatgacaacgaaaaaaggagaattgaaagctattttgaaaaatacgttagttataactcctcctttggtgaaaaaaacgccttcatttcagttaacagttcaactataagtcataatccactatacagcgtgtggaaggccaaaagctttactgataatgacataatgcttcatttttacttattggatttattaaataatagagacaagcttagcataaagcaactaactgatgaaatttcaattaattatgggacaatctttgaacttcaaaccgtccgaaataaagccaacgaatacgtaaaggaaggtattttaatttccactaagcttggaaaaaccttatattactcactgaacaattcctattttaatgatttaacgtcaagcaataacagcttgttagactgtttaaaatattatcaagaaacagccccctttggtgtcataggcagctatatactccaaaatgagaataaaaagaatgatattttccgctttaagcaccattttattgctcacaccttagaagataaaattctttttgaaattctaagtgcaataaaagaaaaaagagaaatttctttcattgttgagagcccaaaaaatccaaataaagctgtaattttaggaatacctttaaagatatttgttagtactcaaaccggccgccgttatttgaatatatacaacgccaaaagaaaccgctttgtaaatcacagactagactatataaaatcagtcaagctgcttgataaatgtaataactatgattttttaaaagaaaaccttaaaaataacttagacaaatgttggggagtatcctttggaaacaactctagaaaaaaagtatttaaagcaacactatatattaacgaaaaaacagagacctacatcattaatcgtataaataaagaaggccgtgatggcactttaaaaagacttaaaaagaatacttatttatactcaaaggaggtttttgacccaaatgaattaatgtcatggattaaaagctttataggaagaatcatatcaatagaaagcggagaaaactttgtagatgcgagattttttaatgatatgcaaaaactaaaggaaatgtacttaaataaggagggtaactaatggaattattttccgaaatttatagttgctattataatgctgttacacaaatcgtaaatagctgcatcgaaacacctatttcaaaagaggctataaaaaaatttattgatgataatgctttcagtgaaagttcctttcatatccttccaaaattattaactggtgattggaacttattaagaaaagataacgataagtacatatcaaagctaaatagttccattaaaaacccagtaactaaacttcaaaagtcatggcttaaatctatcctccatgataaaagaataaagctatttttagataaggctgaacttgaaactttatataaaagcttatccgacgttgagccactatttgatataaatgatttttattactttgacattttttcagacggtgataattataacgaccctatttacatagacaattttcgtttcatattaaacgcattaaaaaataaaaaagctataacagtttcttttaaaagtggtagaggtattcatacaaatggtaacttctttcctattaagatagagtattcaagcaaggatgacaaatttagattacattgctttagcattaatgctagaaaaagtttaactcctcaagttataaatataggaaggatatcttcagttaaactttacaaatcaaccttaaacttttatttggacacctcaatttacgaaaaaattactagatgtacagaacctgttgtaatagaaatatctaatgagcgtaatgcccttgaacggtgtatgttaaacttttcagattttgaaaaatacacagagtacaacaaaacatctaataaatacataacccatatttattataataagaatgatgaaacagagcttttaatacgtattttgtccttcggccctgttataaaggtattaggtcctgaaaaattcttgaattccttaacaaaaagattaaaaaagcaattagaacttataaatatcgcagactgattaagtaaggcttttatttaacatcgatttcgctatttaatcaaccttatatagcaatttcttcttatagtaacattttactcttacttgtataggttgtataatatttttataatttaatattatgcgtttaccaatcaaaggaggaactaatatgaaatacttaactaaaaagctatttcttatatctacctttatgggaataagcttagcttctgtgttttctctagcaactacagcttatgcctctagcttttacatctcaccaaatggaaatgacaataaccctggcactataagttcaccttttttaactatatcaaaagctcaagaaaaagctaattatggcgacaccgtatatattttaggtggaacctatacaaaattcaatattacaaagtcagatgctaattacaattacgttaataacattactaaaagcggaatcacttatagagcatattcttcaaaaaatattcctatttttgatttttcaaaggtattaccctcaaaaagaatagcagctttcctaatagaacctggtgtatctaatgtaacttttctatcttttcaagtaacaggggtaaaagtaggcactcaaaagcaatctgaatgctttagggtagaaggaaatgcaactttaaatcaggtagtttgccacgataatgaagcaaacggattttattttgttaatcatggtaccggaagctgcataaaatgcgactcctataataacattggtcctactaaaaattcaatcggaaatactgacggctttggcgctcatggcgatggcgttacattttcatattgccgtgcatggcataacagtgacgatggttttgattgtcttacttcaaatggagctaacactttcgatcactgctgggcttttaatatgaatgctggtggcgattcaaatggctttaagataggtggttatggtgccggggcacctcctaataaggttcctatacatactgttaaatattgtttatcagctaataataatgctcatggcttttatgctaatcatcaacccgggcaatctgcaacttggacttataactcggcttacaacaataaagccggtaatttcgatatgttagaaaggattagtagaaataattcaatagacattccgggaacaagagaaatagttcattataatctgacctatggtggaaatgctattaagaattccaatttgcctagtcaaaatgtaagcaacaattcatggaataagaatggtattgtagtttcttcctcagattttcagagcttagacgtgaatcaactttcaagtcctagaggtactaatggtgctttacctttaattacgtttatgcatctaactagtggtagtcaccttgccggtttaggctgcttttaattccctcattagaaaaaagatagtccgtataaatttcatttaaatcactttaatgaaatttatacagactattttttatagattatctgatatatcagttaaactttgagataaattagtaagcgcttctatacttgatgtaatttcttctgtggctgcggtttgttcttgacttgatgccaatgttttatcacttctattatttgtctcttcaactgcttctttaatattttgtgtaaattcttttatcttaataactgtatcctttgtttgtgttgaaagagttcttatctctttagctacaataccgaagccccttccagcttctcctgatcttgccgcctcaatagaagcatttattcctagtatatttgtttgagcagatatgtcactaataacctcagaaatcttttcaatgccctctgaaagttcataaattctttttatgtcttcacttaactccatttcacttgtattaatttgtgacgaagtagccgcaagttcttgcgccgctgcttcaattgatactaaaccttcatttaaatctcttgatgcatcctttacctttttagcagaagcttttgggataataattccgaaagatccaacaacctttgaactatctttcctaaaaacaggatagcttactattactactggaatgccaaatacgcttccatcatcttctctcattacaagtttattagttctcatagcttccaaaccagtactgtccggtgtaagcttatcaccaacttgtatacttctcacatcaaattttttagatccttgcctctctacaatcttttcaaaatctgatgtgtacaaaaccactccttctggaaacatctccgccataataggtgcaaaatgctgaaaactactcattaaaggcggtatagcaggtagtatcacgctaacagctccaactatttcaccctcttcatttataacaggtgttgctgttccttttgcatttattccattctttttatcatgcacttccactgtaacagttcttttttcttttatacatgtgcgctctgctccatcatcaagcactttagctccaatatacaaatcttctatatcaaatttctctgacgagagcttccaggttactgtatcgccatcaactatgacataaacagctccttcctccatctggttaatctgcagctcacatgctgccttaaaaccatctaactctgatactttaatcatgttataatcctctccattctcttgtctctacacttttatacccacttagtatttttcaacattatagtatctttttctactattatcgtcttttttctgttttgtcttatagttcctttcctataaaaagaaaagagtgcagataaaatcatctgcactcttctttttatattacttatattaattttcctctacaccgtcatctctttttttatatctgtagtaaccaaatcccatacctgaaactattaccaatgctcctaatatgaatgcccaatcatagcatactccacctgtagctttataaattccaaatgctctacaaattccaaaccagcaagtatctgttgctacaattccatatttactaaagtgagtagttataaatgttaaatattcaccatcactttttgcatccatacttgttacctttccattgtccgctatgtgaacaatgtctaaatttattctcttgcctaattctgcaggtatttttattttaacttgaacctttccatcaggctgaatttttacattattttttaatattgaaacatcatataaggcaactaattccttaccttttagtttatcattagttaaagttgcttttttaacataatcagctgaagaattaaattcagtttggttaccttcttctttaattgggtctacaaccaaaacggtgtctggtgagaacttagttccatcaactcctgttactgtgattccattaggtgagttgtgtaataaaagcttactagcttcatcaaccacatcatttaatttctttaccaaatcaggattaactagcgctttttgctctttatttagtgcattgtaagaatcatttactgctttgatttttgaaacatccgccttcttaacacttccctttgctggtaaagcctttattgcagcttcaacccttgcaacttgatcctttaaagcttttatagcatttagtttgtcctttagatataagctttcatttataagcttagcatactgctcatttgttaatgttgagcttcctcctgctattttatcatatacgctcttcattttgttctctaaagctattatgccatctttaccattaggcaagctgtctactgtcttaacaatgttagaagtttgatcttttaatgacataacttctttctcaagagctgcatatctgtcttcaagggcttttacactcgcttttatctgagatgcatatggctctttaagatcattatgagtgtttaattcatttctaatagcatcaatagcatttttactgtcactagtatatagaacatcatttacacttggcaatgcttttaaagtaaagttaagtacacttctatttcctgacttatccactacttcaagactgtaagctccaggtgttgttaactgacttcctgaggttaagttttgagcagctccgttgttcttcttgtaagttgcagtttcaatttgtccaaaattatcattgtaacctataacccttcctatactgtagcttccattttgtgccgctccagtaatagtaggagttgttttatcaatcataacattgtaaattgtgtttgaaacattctccactcctgcatctgatacagctttaaactgaactgctgaattaatctcattgttgaaggtataagttgttgaatccatcttattccaatcacctgatccaattttaatgtaatagcttattggagctatattgttatcattggcatttgaaacatcgaacttaactgatttgctagtccaactgtttactgctcctgtaacatcaaccttagtagaaggagccaatgcgtcacgtcttatcataagagaattctcttctccgtaaacaccagacttactaactgctctaaaatagtaaagcttgtttgtattttgattgattgttattttatcctttaatgtaccatctgatgataatggcatatcagtccaagtaccattgctaccagctttgtattgatatcctgctatatctgaaaatgctgtagaatttgataaaactatatttatatcagaagctgtccagctactattataagtcttgtctcctgctgttgcagttattttaggagctgttgctttgttgttatcaactataaagccatctgatgatacaacctttgatatatttcctgctttatcaatagctcttgcataaactacgcctttaaactgacggcttaatttaagctctgagtaagttttccatggtccattttcgctgtaagcatcacctgtaccatcttcaactacttgataatcataatggtcaattccacttatatcattatttgcatatatattaacatctaaggtatctttgaagaataggttaaagctaatagtatttaaaaactctgtaaatttattttctttaagagcaactgtcatagctgttggtatagtcttatcaagttttaattcagctccactagttactgaaccataacttccacctttagatactgctctaaaatagtattttgcatcttgatcctttgacactgttaattcgttaaaattagcaccctgcatatccttccaacttgcttcatcagatggatctgttgagtattgatatttaacaaatgcagcttcactaattccaccacttaaaacaaagttaatatccttatttgtccattgtccattgtagtcagcaccatttgatgtagttgcagtatttacaatattgttagtatagtttggttttatgatgtatacatccttctgtaaaacatcactttcaactcctgaattacttactgctttaaacttataattaacagtagcatttcctgtacttgttactgtataacttgtaccttcaatcggattccaatctgttccgtttgttgaataatagtatttaactcctgaagctacattattaggattttgaagatttacagttacatccttttcagctggaactgtagctgagtaattgtaatcctgttctcctatcttcatactgcttactgctacagatggtttaactttatctattttatccacatttactacagtagaagcacttgcacccgcaccgtttataactgtgaaaatatagttaccattttcgccaactgtatatgaagagttttctgtaatatcaactggagttccattatcctttataactgttacttttgaaacaccagaagctcctgcagtctttgatacatttaaaacaacatcattttttgtccactgtgttgaatttcctgtaacattaatagttggtaataccttatctataataaagttgtatgtttttgtgttgccataaatatcagttcctgttaacttgtagtttccatcatcactaagtgttgtattgtttccatatggtacttcagttccattatctactgatataattgcattagggaagttagtggtatctatagttacatcgcctctatactttcctccgtcatcaatattttttgcacttccattaaatactttattaatatttatatccttcgttacataatgactagcatctgaatctccatatcctctgaagatatactttccaccagtagatacagtcattggtgagtgcatatcctcccaagtttggccgttatctgtagaatactgcaaactatcacttgggaatgtaaaagtaatgtccttattagttggcgtattatttacataagggtcggtagtacctacatagtacattgaaacatttgcacttatagtataacttccaacaaatgcgctcttactattacccgaagcatccaatgcttgaacatataaatctgctacttcacctgttaaacttgcattatctgatacattaagagcatttacttttttccaatcacttttaataagctgtcccttaaaaattctaatagttctataagaagtaatattacttcctgaagacactatgctatatggaacattttttgtaccagaatacaagttagtgcctgttgtattttctgtagttgttattgatatagtatttgtttccttgtatatagttaatttttgactataataagaagaccaatcaccatttgcattttgagttcttaattttatagtataacttccacttccaagtccattaaaatcaaatgttacattagaaggcttgtttgaactagaataagttttagtaagtgctgatatcggctgcaatacagaatcgtatacggtccattcccaatttgctatattatctccattaggtatatatgacatatcagttgctgtaacctgagttccagttctaagtgctgctactgctgtgtctggcattaaagcacttgtactaaggttaaactgtgacactggagctatattcgcaacagttgcaacatatgagctggcataattactccactgtccggtgacgctatcctttattctaagattaactatactataagttccttgtggaaatgttaaggctgtggttcttgcatttcccttatcctcccaaacaccagtcactacatttaatactctccagctgtaatctgctattggatttccattagaagttgttgtatccggagtgcttactgtaacttgaccatttccattgaacactgttgatagattaggtttatcaattgtactttcactgtctatttttcctgctatataatcagaaatagctgcaacaccttcacttaaactgtctgtagaagcattacttctgtttataaaggttcctctactattatttcttgaaataaagccatttgcctctgattctactgttcctccacttatactgttattaattccccatccaacataatgcgaattgtttagcatcatgtaataaagaattgaactgtacttagcataattattaaaatcacttactccatcattatcaacatttacaactaatttcatagaatcattgtacttccaatttgtacttctaactaagtctgcaaaaccaacagaggtatcttcttgcatagttatattactgtaagtaacccttgtttgtattccgcagttatgagcttgatatgaagcaataggtccgaaaccaaattctccaaatgtatctggaagagctacgtttgtaaatatagctgatgatgtagtattataggttccatcagtaaattgatatagagatgctgatgttggtgatgcaacaagctttaaatatctaagtcctccaactgatgctggtttactagttttagaaagcaaggttacagttccaccccataagtttactggtgcatttaatgttgttacacttcctacaacagtttggctcgtttcttgagtaaatagtgatacatctatattcttaaattcatatattcctgccacacttgaacccattaatgctgcataacccgataatcttctatttcctgaagaatcataggtatatttacttccaaataggaatcctgctccatcaagtgtgtggtagtcaacagatccttcatcaagagtaaagttaaaaaccttgttatttgcattgtaattaggtgtaattaaaaaatctttaaatgctggtattccatatcctaggaatgttactgatttaccatccccagctatttgaatatgtgtgtttgttatgtttgttacatttgggtcagtatactgaacgacatagttgtccgcatcgtttacagttgcattagtatttgtatgatcaaacctcttccacggaaagctgtttatatttgaattaattgtggaatccactgaacttacaaatactctgcttgaggaaataccatatctagaacttaaatccgcctttaaggcatctgaaaaacctgttaaatctaaattattacttactgcatcggctgcaagtacaacctctataggctttgtactttgcggtgatgcgttagcaatatctttcatgttcactacaaaaccagcaatcatgaaaaacataactaaaaaagatactaccctcttatccttcctcgacattactccacctcttcctttatgtttgtatatttatagttatttaattgataattgtttttatttaattatacatatcttcaatgaaagaataataaaaccacaatgaaagaataatgaaagaacttaataaaaaataaagccttaatcctacaatcttcttggattaaagcttcttattttacatcttacaattatttcaatataaattatcgtaaaacttttattaattttctgtaaagctcctctacagaatcctccacctttacacctaattccctaaaaagtactttggcatatctttcataatgtttatttagtgatatcttatctcttcttgctgccaatatgttcataaaaattttatttacttcactgtccaattcattgtattgaatcaattttttccccatgctataagcatcatttataagatcgttttctaaataccaactacacacttttccaagaaacttactgtataaattagatgcatactctttctctccaaccgcccatatgtattctttatcatcaaaaagatctcctttatagagataaactaattgtttagctctatctatattatctttgttgatctcttttatagattctactccgcttataaaatcaatgtaatctacgtaaacatctttaaagtcaaatgaatacccttgagaatcaaatgtaattattttttttagtcctagagggcttaaagcttttcttagctgatatactatagtattcaaataactctcaacatctttcaattccatctcttcaaatatgtcctttatcactcttcccctcgagatacttctaccactattaattacaagatacgaaaatagctccatacttttagttgatatccattttacagattcattgttccttcccctcacctctaatccgccaaagcaataaataaatgccttatattcttcttcaccactttttataatcaccttacttgctctatctatagctctttctaatttttcttggcttacaggttttactatataatctaagggaaaaacatcaaaagaatccagtgcaaattctttgtgagatgatataaatacaatgtttatttgtttttttaaattaacaatctgtttcgctaaatctattccattatctcctgatatctttatatctaggaaagctaaatccacttcattattttctagaaactccatagttgtagaaagtctatcaaatgtcccaataacctccacgttatgtatcttactaagcattttctttaaaattaaaaacattgccttatcatcatcaacaataataaccttcataaaatacctcctactaatttaactcccattaggaatgctgaaacacactgtagttccttcatttaatctactttctatgcttagctttccattatttttttcaatgaattctttacagagaattagcccaagtccacttcccttctcacctgaagttccatctagtgacataatatcctttccactctttaacctttcaattatgctcttatctattccaataccattatcttttactgaaactagtacatcctcacctttcacttttgcttctatatttatctctccctcactatctgtaaactttacagaattggtaatcaaattccttaaaactatttcaatcatctccttatctgcatatacaattatactttcatcaattcttatgtttatttttatattttttatattagctttatgtttaacaattccaactacacgcttaacacttaaaatcaacttataattttcaggtgagcaacctataccttttttttggctttcaacccaattaagtagattctcaaccatagcaaatattttcctaaccaattctataatttcagctacaacttccttattttcttctgtcattacactcatatcttcttctatgaattctactaaattcaaaagcatcgctataggatttctaatatcatgtgcgataacagatattagtttatctttaaactcattagtctctgcaagaacttttgattttttttgaatctctttctctgttcttatcctttcagttatatcataaaaaattgataccgttccaatcactttattatttgcataatatagcggatatatatgaacactatattgcttattaaattgcttcaaattaattaaaagcttcccctctgataattcactacaagcattataccaattgttccattttgaaataatattataaccactgccaccattttctagcttaaatcctaaatcacctaatattcggttagcttcaatattgtagtctataattccaccaaccttatctaaaactaagtaccctattttaacgcttctaagtatagtttcattaactataggtgtaattgaaaaaagctcataccttaatattcctataaataatattacccccataactgcaaaagaaaaaatataaagagtggtgtattcaaagaattgatttatataatcccaaagtaagtctggcaaaataggaactactaaagcaattaaaattatcaccgcttgccttctatagctcttactcatacttgcaatatgtctagctaggaatactagcgcaaacacaactgatatatctccaagcaaaaatatagtccttgcaaacaaggtttttcttattgttaaaactccatttataactaatgtctcttcactcataatatggtgaaaatcatctgtccaaattaaaattaaaatagcactgcatactagtaaagccatacttacaggtaatgactttatgtatttacttttgcctataaaatcaagaactatagctattgaaataatgggatatatgattagaatcgtctgttctacatttctaaaaactatctttccgcttgtactaaaattagaatgctctaatatggccgctatactaaaagcaaaccctgtagtcattaaaaaaaagtatgatttaactccatttgcagccttatagtagtacgcaaaaaaaccaataattgatattattacaaccgatatttcaattatatatatgttaagtaaattcattttctccacctttaatactaaaatatttttcaaattacttaacatagtattacttattttaaagaataaaatacgttcttataaaaaaagccggaataccagttctaccaattattccagcttttttaatacaaacttacattgcaccctctaaaattttgcggcttacttctaatgttatagctccagtttctgataatgctttcataccgtgcttatccaaagcatttactatatcatcaattttatcagctgtaacaccatattcagataagtgtgtcttaattccaagactttcaaagaactcacgtgttcttaaaattgctaagtctattctgctatcatcatcgccttcagttatacctagtacacgctctgcgtattgaagtatctttcctttcttttgttctctcataacattccaaattgatggaagtattattgcaagggtttttccatgatctattccaaacattgctgtaagttcatgccctatcatatgagtgctccaatcctgcggaactcctgctccaataagcccattaagtgccattgtagcacaccaaactaggtttgctcttgtatcatagtccgttggattatctatagtctttctccctatctcaattaatgtctgtaaaattccttctgctgtacggtcttgaaatcttccttctgctttaaaagttgcatattgctcaagcacatgaacaaatgtatctgcaacaccattagctacttgagattcaggtagtgtataagttaatgtaggatctaatacagaaaacttaggaaatacaagcttacttccaaatccgtattttccatgttcataactaattactcctccattattcatttcagatcctgtagctggaagtgtaactactgttccaagtggcacagctttattaattgccgctgccttttctcttgaataaagaatttcagctgcattatctccttcatagtacgctgctaaggcaacaaacttggttccatccattacagaacctcctccaactgccaacaaaaaatctatattttctttttttactatatccactgctttcattaaagttgtaaattgtggattaggttcaattcctccaaattcaataacttgtctatttcccaatccgtttataaccttctcaagagtaccaaattttttaacacttccaccaccataaagtactaatacttttgcatctctaggaacaaggttatcaagctcatttaaacgatcttttccaaatactatatgtgttgggttaaaaaaatcaaaattatacataagattatccctccaataagttatattttatatattctttctagttttatacaaacttatgctacaataattataaaccttagagtacactctaagtcaactttaattatcctaaacagttttaatttgctattaatgaatatttcccaatataaagtagtatgctaatatgaataaaattagaatagtggggtatttttatggatgaagatgagattattaaagcctttgatatgatgtggggtaaatatatagaacctgtagctttgattcgccataactttaatgttgttgctttaaacgatgctgctaaatcattagggatgcttacaggtgtaaaatgtagcgccaaaaatcctgaatctcataaaggctgtaaagctgcagaagctcttagaacaaactcaactcagatatccaaggatgatatatcaggatccgaatggacaagcttttggattcccgtttcaggtcatcctgattattatgtacactttgctagcggaataaatgagtacttaaaaaattctaaataaaagggtatatacccttttattttatactacttttgtatatatgttcgtttctccctgctttttagaatactctcccatcataggcactaattttttaaaatgctcagattgcatgtgtttttgtaaacactccatgctttcccactcctcaatcatagtgagaattgttttatcctttaaatcctgatacatttcatattttatgcatcctttatccttagctactgtaatttctactaattcctttgctacctttaaaacatcttctattttttcttctttaataaagtttttcgctactacctttaccatattaaatcatccttccttatttagaaaatcatatacaaggtcttaataaaacctcatatatgattgtacttcttataagctatacatttcaacttaattaaactagattacagtgccacctaagttcatccaattgccccacctatctgtccttgcagtttgccatatattccaaagagcactatccctgccccttccaaatactgatattcgtccttctctattatttcctacggctagtctatctatccagcccctaagcgactgccaactactccaaccattgccttgggcattctgtcttatattccaaagagcattatctcttcctattccgaaaacttctaatcttctattttgattttctgtaactgctatcgaactaactgagcctccgagagattgccaattactccaacctccatttggtgaagtttgcattatgtgccatacagcaccgtctctgcctcttccaaaaatagccagcctagcacctctattatttcccagtgttaatatatctatccaaccacctaaggtctgccagcttccccaaccagaattaggagcagtttgctttatgtgccacaatgcattatccgttcctattgtaaacacttctaatgttctattcgcatttcttcctactactactccattaattcctccccctagggaattccagccgctccaaccaccattaggtcttgtttgccacgtatgccaaagggcaccatctctacctcttccaaaggcttctaatctaccatcactattacttgccactgctagctgattaatccagcctccaagtgtctgccaattactccaactattctgctgcgtttgcatcctataccaaagagcgttatctcttcctattccaaatacagccagccttccatttgcacttctttgaaccgctatggaacttacccacccatctaaattggaccaattgctccagcttccattaggtaattgcattttatacgcaacttgattattactattgattacaaatacatgtaaccgtccattggagtcattagctgctgctattacttcacgaaaatcatttgtaaccctgtcctcatcacggtacatgtaatcaaactcattgtagtctccatagttttctgaaatagcaaaatttcttccgtgatatggacaataaaatactctatttgtgttataaggttccaagtaaatttcctcctaaaaatattcacacaaaatatattatattctccaagactaaaaatgctattcctaactagcatctatttcacactatcaatgaattcatcaattatccttctcgcaatagtacctttaccaggtatattgggtagctcgtctttactgaaccatccagcatcagttatctcaataccatccacctttatatctcctgcttcatactctgcaaaaaatccaagcatgagtgaatcaggaaatggccaagctgaactattataatacctaatattctttacccttatgccaacctcttcgaatacttctcttctgactgtgctctctaaattctctccagcatctacaaaaccagaaattagagcatacataccatcttggaaattactgttatgtgctaataatattttatccttatttataattccaactattatagctggagaaatcacaggataaattatgttaccacatttattacataccttggctatctcatcctctttatcgtttgttttagctccacatctaccacaaaatctatgttttctatcccagtttaaaatttcactagctctacccgctgctaagaatatttcctcttccattaatgataaaatcttacgcagagacataaattcaaagttctcatctaatttaatttcttcaaaaagctcaagggcaaaacatgcgttatctcctatttcccctaaaaagatttctttctcgtaatttattttcagcttttgtacatcctcaagcgaaggaatacatggactatttttcgtttttactattacatttccttcaaaaaatgcaaaacataaatcacagttcttaactcttctatttacatcggatattatcctaaattcactcatatttcaatgtatcctttcatctcatgcaaaaacgcataccaatatttattttatattataacataacaagccaattaaaacattctataactaacattgaatattcaaatgaatttatataataaactcatagttgtaagcttagatattattaactaactatatgtaatacatgaaataattctgcattgaatttagtagtgtatggggactatactttaggtgatttatttttagcctactattttattttttcaaggagagtggacatttatgtgaatcttaaagacacatagctatttctttatatataaattcaataactaaatacaggagatgaaagaatgtttagaggaataaaaaatgtaaaaatttccaatataattatctttatgggtgtgttttctatacttttaacttctattgttggttttctcggtttcaataacatgcagaagataaacaacaatgttaaaagtatgtataatcaaaacttaatgccaatttccgatattggaggaataaaatcagagttcttaaaaatacgtcttgatgctactaatgctgctaggagtacaagctatagttctgaatatgcctctaatataaaaaattatgataatagtataaagggttatcttaaaaattttataggcagtggattagattcaaatgaaaatgcgtctataagttcttttaattctaactatgaagaatacttgaatttatggacagaattaaattctgcattaaaaactggtggaaaaatagcagaaactaagataaatagatttgctgaacttggtgatataatagataaatcccttacagctttaagagactacgaaactaaaaaagctcaagtggttatgggttcaagtgactcaatctattcttctagtaataaagcttttattatagtattgatatttgcaatttttatatcaacatttatttgtgctgcggttgtaaaaatcattaaaagttcatcaagagaaattatagagaatttagaatcagttgctaattgtgatttcactgttaaagtggatagtacccctaaaaacgaatttggtataatgagcagttctttagagaaaaccataataaatatctcaaatatgataaacgatataagatctaaatttgaccatatagattcaaaatcacacgatttagcttctgttgctgaggaaatgacttcttcttctgcaaacgtttcaatatcaatacaagaaactgctaagggaacctcagagcaatctcaaaacctacttgatataaataatgcaatagataaatttagccatgaattagacaaagttgtagagtccataaatagtattgatgataactcaaaaggaattactaatttagctaacaatagcggaactaacatggaaacacttttatcttcagttgataacttaagttcttccttcaatgaatttataacaaagatatcaactttggaacaagatgtaaataggataaatgaaataacagacttaattaacaacattgctgatcaaacaaaccttttagctttaaatgctgctatagaagctcaaagggcaggagaatctggaagaggctttgctgtcgtagcagaagaaataagaactcttgcagagcagtcaaaaacttcttctgaaaatattggtattctaataaaagatattgtaaataatatgggaaacatgctagatagctcaaaccttatgaacaaagaacttgacggccagacgaatgtaattaatattaccatcacttcctttaaaaatataatccaaaaaataggggaagtaataccaaaaatagaggtagcaaatatgtctgctatgaacattaatgaaaagaaaatgagcatagtatcaagtatagaaagcagctctgctgtatcacaagaaatagcttcggcctctgaagaaatagcagcctccgctgaagaaatgagtttatcagccaaaagtgttggagaaacttctgaaactttaagtgtaatgactaaaaaaatgcatgaagatttaactaaatttaaggttatagaagcttaaactaatatatttttaaccaataaaggtgagcacttaatttagtgttcacctttattgctagttattataaatcccctttaatgttgacttttctaaaatatgtccttccatagctttatagagctcattcatgtaaaatccatctttaagattaagctttacatctaatgcaaaaacatgaagctcataaatatgaggagcatttggcggtgtcattcctccatatcctatgcaaaattttctatccgtgtttccaataggactgcaccagctatttattccttgaacaaaatcctttgctgaaatactttcattttcatttagttcttcttttgttatatttgaagctaaccaatgaatccaggaaaaccctaccacaggaacagcatctttgtcctctaaaacaagtgcatatgagacagttttatcgggagcatttttaattttaactggcagtgaataggttggtatacctacttcattaaactgttctccccttttaccgtacttattttggattactccatttactataccataacttgtaatgttcaaacttactcctccttcaacctttaatttttattttagtatatatgggagtattgattacgtaaattacccacttttttgtgggcacactaatttatacttatttatgttttagtaaagttttctcaccttcagtaatcataaattcactgccaacatcctgcattatagttaatgcttcaagcaagcgtttacctctcttctcagttagaaaatactcaacccttaagggataccctttgtatgtaattttatcaaccaattcaaattccattaactcttttaactgctctaagagcattttttgtgtaatacctttaatatctctttcaagctttgaaagcgaggttttcccgagcctaagcctccataaaattatagtcttccactttcctttaatcatatcatgtactatttctaaagggcatgtatattcttttcttatcttcatctattacctcctgctttaaaataaaagcctagaaaaaactaaaatttcctaggcctttagactatgctatttactcaaaaggatatcttattccccactgacttctaacttcatccattatattcattacaccaagggacagctgtagcgtataatccgtatctttattcaatatacacgccttcatatcctgaacttcatacactaatgccctatcagtttctcctgcttctacaacctctactgacccatctggataggttattgtagccttatcagctcttgggaaattttctacagttatatatgctttctctcctgccacaactcctcttttaggttgttttgctctcatggttaaagaaataactgccatttcatcctctgcatttttaagtattatacctgactgttcatccactccagtttcaaacttcttcactgttgttagaatctcctctggctggctagaaagaaagtatcttgtaaaggaaagtgcataagtacctatatctagcaaggctccccctgctaaatctttactaaaaaatctgttattcacatcatactctttaagacttccaaaggaaacctgtatcattttaacctttccgatcttaccttcatctacaagctctcgaagctttttatataatggcatatgataaatggtcatagcctctctcactattaaattctttttattagccaaatcaacaatttcttttaattgattaccgtttacagttatagccttctcgcaaaatacatgtttattattttcaagacttttaattatatattcgtaatgattacaatgaggtgtggatatatatactacatcaatgttttcgtcccttaacatttcatcataatctccgtaaaatttttcagctttatactcattggcaaattttttagctctctcaatatttcttgatgcaacggcatatatattgttatcaacttctgatatagcttttgcaaaatctctagcaatagttcctggccccaatatagcccattttatattcctcataattttcaccttcctacttatattttacatttataatatctactgtaacatactactcattttttctgcaactatacttaaatgagtaaaagcatatattgtaaaatacaccctatattatgatataatatatctctaacaaaatactattggaggttttttatgtccgaatttaacgcaaaaccagtaaaaaagctatggaatcctaattctttcattgtattttctgtactattttcatttctacctgccggaataatgtatgccttaaactatggacgatctggatacaataagaagaaatggacatacctaattggtgtaattatatttctgcctattgccctttttttaacgtctcttttaccagattttcttagtaaaacagtacttaccggaattaatgccgtaggtggaatatattttatgaacactcaagaacaactatataaaaatcatattaaaagcggtgaaaaaagagcttcgtatttcttacccataactatctcgttattgtttacggctctaatccttgctctctacataataggcagctaatctaaataataaaagcaataaatagcttgtatgcccttattgcttttattttaatcacattttatttaataatatcttcaatccagctaagtattcgctcccagccaattaactttgcaccaacctggcaatgatatcctgctccattttctgatgtaaaaaacatgtattcctttttacaccttaaaacatcatataatggtttcgattgtcctccaagaatcccatcgttatcactgtctataaccagtgtcggacactttatcttttcagctatatccttaagataaaaatcctctgcctttaaaatatactcatggggactattcacaccaaatacatacattccatgataaatcccccacctaaccttagagtttaatttagcaatagaatatatatttttatcaaactcttcaggattaatacgtgcagctgaaaaaaattcttctcttgaattattacctaattctcttagtatcccaccaaaaaaatcataaactccactgtttgcaacacaagcggcaagcctatgctcaaaagcagctgccctgggtgcaagatatcctccaaggctttctccccacaggataatttttgcctgatcaacctcttttcttgagattacataatctataactggtgttaccactttctcataatcgtatctgaaaaacaacttctgttttcttacggcttccccctgcccgggtccttcaaaagtaagaaaattcattccatgttccaacgctgtcattgcaagtccataaaattcttcttttgttccgtcataaccggtcattgctatcaaaactggcgcttttccgtttgaattttgtaatttgtaataatgtgctggcaaaaaagtattctcatatggaattttcactgcttcaattgcaggtttgttaagcttcataacatatgaaaaacaccgaagacttttttcatacaattctcctattattggattatttggattctcgtgaagataaaattcagcagttctataataattagctgctctaagatatgccttttttgcacttataaaatgcccttttgaatatgactcctctgcactttcttcaagacttttagcagttttactccactcatcacaccagcttttaaaatcaccttcttttattctctgtgcagtttctacaacttctccaatatccgctgctcctgaagccgacgaacctaaaactcttaatgtttgaaactcaaattggctgtctttaaatatcaaatttttcattatttctccccctaataaactccactttttaattttctttttgttataatacttcctaaaagccaaaataaaatagtgcaaagtaaaagataaccaagctcagctttaaactttaatatactgcttccattttctattccctggctaagtgtcatgaattccttttgaggaataacattacaaatataattgaacatcttattatttactttaaaggaatagaagcagcctgccattatagacgttaatgcataaactccacttgcaaatactgaaatttctttttgcagaattgaagaaataagaagagctgccgcagttgaaatagcactaagaatccctataagtaatccaagacccccaatggtgaaaccaatttttactccaaaacatagttttgtaattataacagctgcataagtcggaacatagacacatataaatgtagccaatccttgagcaataagatattctctttcacttacaggtgctgttagtactctcctaaaggtttttaaatctctatcctctggaaaagtgagagttaaagcaactccttgagttaaaactatcatcataataaaacctaaaatactggttccaacacctcttttacttttttcctcttccttgttataagtgacctttcctgttttaaaaaaagcttctatctttcttttatcctctttattctttaaagtaatcaccttataattgccattatctttttgctttacaatggcagcatatttacctaaaagtagattatattcagctggacttttcctcattacatctatctcaattttgctattcttcggaatattttgaactttatttgtaactaatgcaatattggttttcatctctgccttagttgaaaataatatggcaacacatatcataataggaacaactattactgcaataattatgattgctttttgcttcaaaattctctttatattgttcttaaacaaatttattatattcattatacgtattcctccggtttaaaaataatttggcatattactatgcatattatagagctaactagcattacaccaatagttggaagatatatactaaaatcattatcataaattattctaaaaatgcactcagtaatccacttaagaggtgataaattagatatactttctactatctttccaagactatatacaggaaaaaacactcctccaaagaatataaatagcatgattacaatttgaagcacagaattcgctccctcttcactcttaaaaatgcagcaaaataaaactcctaaacagcatccgaataaggttaacatatttattaaaattattatataaatcgtactccttgtaccataatttatattcaaaacatattttcctagaactattataatactgtagaatattgatcctagaatataagttgaaattatcttagataagtatatttcagccttagaaactggagcatacacaattctagtatttcctttcttaacactcttttccataaaggtatttgatgctgtaatgcaaattataaatgctgtaaaaatcatcatagttacaccataataatcgtaggaggttacattaaaagatccatatccattcttcatgacaaatcctatactaccaataagtattaaaggaaatatagtattaaaaaataaaagcattggatttctaataatatttttaaaatcaaacttaactatccttataaaattcatagtatccccctaatctctcaaactctttcctgttagttctaaaaacacagtttctaaagatgcttctatactcttcatactttcaattctacatccgctttgagtaattttagatatgatttcattaaaattatctttagattttttagttgttatattggcttccccatcttgcaacacaacctttgttacaccatcaacctcataaaggcttttatcctcaaatttatttggcttgtccagcgcaaaggaatatgttatttcgtcatctacctttttctttaactcttcctttgtaccctccgcaattatttttccttcattcattattataattctatccgaaatagcttcaacttcttccatatagtgtgttgaatatattatagttgctcctctttctcttaaggtcttaattgattcaagtatgtgattcctcgactgagggtcaattccaacagtaggctcatccattattatcaacttagggttatgagcaattgcacatgctatattaagccttcttttcatgcctccagaaaaagtttttggcttatctccccttctgtcgtaaagacctacaagctcaagagcctccttaaccctgtcctttaaatcttttcctctaaagccatataagcttgcaaaaaaactcacattctcttctgcttcaatttcctcataaatagctaaatcttgaggaactattccaatccctcttttgattaacttagcctctttttttaaatcatgtcctagaatatttacttctcctccatcattttttaaaactgttgctaaaatatttatggtagtactcttacctgctccatttggacctaaaaatccaagaatctctcctccataaacttcaaagctaattcccttaacagcttttttgttatcataactcttctctaaattcttaacggtaacaatcttacttacttccatatttctctctccttcttcttgcaaaagcttctgccatttctatttgttcctctgtaagttcaccagatggattagcatcttcctcaaaaccatcctgctcttctccatcaaaacgatataatttctttagtaacatccataaaatcttcatttcctctacgctaaaatcattaaaaatatcaccgaaaagctcaaaacttttttcagcatagctttctgcaacttgccaaccttcttttgtaacactaacgtttattgctcttttatcctgcttacttggcatagtttgaacataacctttaccttcaagtatgtttataatttgctttatattttgctttgtagtccctaattttttagcaatattattaagtgtagtttcatcctctggtaaatgaaaaatagctagtatcgtcatatactgccttgatgttatattatccgaatatttatctgtttgtatttgaattttattattaactgatacaagcgttgcataagtctgctgcattatgtgaaaatctctataaatgtaatccataaaattatccattattatcctcttttcttttagtaaatatattgtctatatttacattaccatacagtagaaatttagtcaatacattgtcaatattttctctgatatttaggcttttttaaaactttctctcctaaagctacttatacatcactaatttcagttaatatattgcttgttttattttaccaaagccctatttttagtaaatgtattgtcctattatgtatatagttgtgcttaactaacttataatttaacctttaaaaacaaaaatcatccctttaaatcaatctaatggttgatttaaaaaactataatatgacttataatttacacaaaatcatatataaggggattactaaaaatgaaaaatgtaaaaataattatcgaacctcaatgttctatgatagatgaaaagacaaatatattagtccaaggacttgttccttatgaaataataacaataaaagccctctctttagattattacagaataggtgctaaaaataataatcctgataactggaaatgggtaaaaaaaactaactttgaatcctttgcagtatttaaggctgatgataagggcactgttgacttatctaaggatgctccaattaaaggttcctacaccagagtagattccatgggtttattctggtcaatggtgtctacacagcagcaagactatactctaaaaaaatctctatcttcatgtccttttttgacctcaatggaggttattctgaaggttgaagtctgtggtaaagaattagtatcttcaaaatgcaaaaaactctttgtttcttcagatgtaaagtgtcaatacgttactgaaaataatttagtaggaaaatactttaccaataaaaattccaaaataaaaaaaggcataattgtattaagtggatcagaaggaggaatacataacgcatcacagatagctgcactattagcttcacatggatatccttctttagctctagcttattttggaatggatacccttccagctactttaaacgaaatccctctcgaatattttgaaaaggccatagattggataattactaaaggcgatatatctccaaataatttaaccgtatttggacgatctagaggaggtgaattagccttactccttggcagcaccttcaaaaaaatcacatcggtaattgccgtggccgcaagtcctattttatttggtacaaataccacgaaactttcaagttggaaatataaaggtgaggatattccctatttaaacttaaaaattaatataatatcttttttgaaaaatgcacttacagataaacttcatggcagaactattaacttttctaagttatataccaatgccatcaaaaatccagatgcaatagagacatatatgataccaattgaaaacacaaatggatccatactaatgctttcgggtgataatgatcacatatggccttcaagcaaactatgtaaacttggtatagaaagacttaagcaacataattttagcttctattatgattttttagaatataaggctggacaccatatatactttccatatcaaccgatatacaagtataatggttcaaatgagaatatggccatttcaaacagagaaagttggaataaaatattagagtttttacaaaagctttagttgaataacacttagctaaaatagaaaggcactagtctattataaaaaactagtgcccttttttaaattataaattcactaaatgctcattgccgcaaaaaagccttcggtagtagcctttattaaatttccactcttattattacaatctcctattacgtatacttcctttactaattccttaaatttatttaccacttctgtacgtggtgttactccaagtgctaaaactaatgtatcacagcatatcacatgctcctgctgtctttcatcaacaaaaactgcatcttcatcggatatttctttaagctttattcctgtaattgtttttacatcttcactctgtagcatacttcttaaagttgatgttgctatggctggagagtttgcatctaaatctttaagaggtctcatatcaactaatgttacttttttacctttccttgcaagcaacagagcagcttcacttcctgtaagtcctgcccctacaactataactttatttcctgtatccatttttctttgagctatatcaccagcccatatgacatttttcttttctacccctggtatatcagggataaatacttttgacccaacagcaataactatggcatctggattctccgctttcacattttctacagtggcttcagtatttaatcttacctctatgttttgggactccatagtcatatttacagcccattgtaaataccttctcatgtcattttttagagaactagctgaggctaccttaagaaatccacctaactcatcacttttttccatgataattactttgtgacctcttttggcagcatctcttgcagcctccattcctgcaggtcctccacctataacaactaccttcttcttagtctcttgaaaaggcatattcataaattctcgttctcgtccgttcattggattaacagcacaccttataggaatacaatatgcatgaggtgattgtcctacacaagttgtacatcttatacaaggtcttattgttctttcctctccatacttagccttattaacaaaatcagaatctgcaatgaatgctctaatcattgcaaccatgtctgctttttcctcaattataacttgttcagctatgtctatatcaagtgatccaactgtagttactggtatgtttagttctttcttaaacctctccgcgtaattaacattaattccttgaggtatataagtaggttgtatcataaatggtatagcttcaggtttgtacaaatcaccaacagaaacatgtataagatctattttctcttgaataattttagcaaactctaaagcttcacctattcttacaccgtgctcatttaattcatctgcacttatacgatattctattgccatatcatttcctatcttttctcttactgcatctaaaagctctctagcaaaccttgttctattctccatatttgaagtactatattcatctgtgcgtttattataaaatggagagaaaaattgagctactaagtgaccatgccctccgtgtatcataaccatatccattcctgcctgcttacagcgaaatgcagcatcagcaaaatcatttatgacctgttttattttttcttttgtcatatctgttggtgtataatccgctcttagatttagctccaaagatgcttttgcaccatatctatgtataacctctgtaagagtatataacccatttactatggtatccttagacatatcaataacataaggcgatgattttgcatattctgcattaacaggactatctccaatagttacaattcctgctccacctttggccatagctcttgtccattcaataaactcttgtgtcacataaccatcttttgatgccaaaaatggttctgctggcgatacttctattctattttttactaatatatttcctattttaataggcttaaatacatttctataattattcaatgacataacctcccattttctaacttcttcaatacccgttttgattatagcattggtgtttttatcagtaaaacatgtaataattatagaaatataagtaaaacttatagtagtaacctaattgtcccaatataaatcacttaaaactcctagaaataactttagcgttggattcatatttccttccatccatgctactcctatttcgactatctgcttactattttcaagctctatatatgaaatattattattcgaatcatttgccacacaagttggaactaaagctactcccataccagcctcaaccattataagcattgtatctaaatttttacattcagctactacattaagcttaaatccatctcccatgcaattttttctcatttgttttaccgtgcttggagcctcttcctttccaaccacaataaacttttcattttttatttctttaacatctattttcttatacctagctaacctatgctctttatttacaacaagacaaatttcataatcaaataactttctatatttcacatgacttatatcatttaattcatacggaaagataaaagtaatgtctaagtgtccacctttcatatcatctgccagctttttatagctatttctgctaaggtttataccaattttaggatatagcttgtgaaaccttttaagtattactggtaaaaagtttttttcgcttgaacctaaaattcctacatttaaagaaccttcaaagcctaaagctgcctgctttgtttttctttctgcctcaactacccttgaagttattaaatcagcttccttaagcaacactcttcccgcatctgttaattccactgcacgattatttctaacaaacaactttacattcaactgtttttctagtgtagaaatttgttggcttattgcagtttgagcaatatgatgttcttctgcggctttagtaaaacttaggtacttagctacagaaataaaataacttagctgcctaaattccataatttcaaaactcccatcatactcagaatgcccccataatactttatagtttatattattatacatctgcttctccataaattataaaaaaagtaaaaaaagcaaggttttttgtaatttgcgtctcattatcttttattaatctaaaacaaaagaccactacacattaattgtgtagtagtccaataaacaatttgtattcttaaatcataaagattaactattatattactagcaattcgtcttcacacttaacactatccatattttcagataagtactctatgaatgcagccacaacctgaggatcaaattgggtacccgaatttttaattatttcctttactgcaaagctcctatccttaccttttctataaactctgtttgaagtcattgcatcaaaggcatctgctactgctactatcgaggcacattgtggaatctcattacctttcaaaccgctgggatatcccatgccatcatatctttcatgatggtataaaatcatatccaatatcttgttttccttaaagtcttcattcaactccagtatgctaaatccaatttgtggatgttcttgtattgttttgtattcgtcttctgtcagctttaggggtttatttaatatagtatcacttatacctattttcccaatatcatgcagaagtgcaccaataaatactttttcacaatcttcctctgaatattttaacttttctgctataaatctagcatattcagctacgcttttagaatgaacagctgtataattgtctcttaactctaacgttttagccaaggtagtaacaagtttagctgtttcatattgtttcttatcatttattcccataagataaatggtagctaaaattgtgactgctaaaattacaagattaaaataaatatttttatttatgtacaatgcagctacaaatgcacccaaatctaaaaatccaaatattttaatattctcctcagaagttttcaattgaatatccttggtttttttttgcatactcattaaaatcactcctttcatcattctaggctggaggccacccttaaataaaatttatacaactccttaattatacatttaaattgtagaataattacgctctattcatgtgatttaaatgtgaaataacatctatattttaaaattagatatcgtcctttttaattattatctatatctattttcgactaaaattatattttcttaatagaatttgttgtttttcaaactgtcttgcaacattttgttgagtaaaacaactacgaaacgccatgaaacatttcttcatggcgttctaaaaactatattacacttttcttcacaaatttaattttattacgattaataatatccataacaattttattatttattataactcttggaatcttaatttgattttttgatattcccttattaaacaatgcctcttttattaaatcaaaggtatttggcgctaaaacctctaccttgagcatacctaactttttattgtttctagctctattgtaagctaaatttgataccctaagctcatcgtctaatatattttgaagcttttcagtactaaatccatacatattatttctaaattcaaagtagaaaatatacctacccggtgtaatagaattatccggctctgttgtataatccaccaagtctaaatttaattttttaattgtattttttatagcataagttagatgctcttcattggttttctcagccgccatattaagtacttgattttttctatataaaaactcaatttctggacatttattatagaatcccactactttaacaacatctccaattttatacctataaagtccagcgtaattcgtaataacaacttcataccttccacctagttttagttcagacaaaagaagagtatcaaaactctcctctcccttttctccaataggaataaattcataaaaaacagcacttggtgtaattacgtacagcaccttgcttgcatatggattaatcccaatcatagcctcagttgatccatatgctgcagaatatatgggaattgaatcaatgtaataataaaccttatcattgtatatggaaaaattagctcctgttacagaggcaatatataataagttaggccatatccttttagctattcctttaaatccttttttgaattctttttctaactccatagctcttttattgttaggttttaactttttatttagaacttttctcaaaccttcatctatatttaactcttcacttatacttcccttctgtatatccctaactaaagccttattatttttctcaagagttctaaataaatctaatatattggaaataaaaactccacttatataaagaagttcttcctcctctaacccaaatagcaaatggagataaagtgcagtttccttgtcctttatctccataacctctattggcgaagtgtacaaatacggaagtaaatgttttatacctttcattccacccgaggtagcagaacatattggtattttcccttttgtatatgtggtcattactatatctgctatcatcataccccgggcgtaattccaattttccttaaaattatcataacaaaatctattaacaagtaaagccatatatttcgaggctcttcttctactattcttagtacatggaactaacttttgtttccctgtagtcccggaggtatggccaaaatattcaaccttctcactcattaacacatttccttcaccatctgccattctatttatatacttctcataatctttatattccgtaataggaacactgtctttaaactgtcttatagacttgatatctttaaatttaaacttaatccctatttcacttttatcgtttgattttaatatcttaaacaaaacctcttcgtttactttaccgcaatttttagtttctttttcaaagtttcttttaactatacccccaagatctatagaaattttatagattactttactcatcatacccgtaatgatgcacttcctaattatttattcttaataattatatgaaactattttcgtgttatttcattattagtatatataaggtataattctatacttaaccttttctttatacttaatatatttatttccataccttttttctaaatactcttcttctttagaaaactttattctataaaaacacaaggaacactcacatattcccactccaataaaatatggtgatgccaagctaaccgaaatcccttctaatataaatgctaaatatattggatgtcttataactgagtataagcctgtagtaactaactctgcaccatccctaggtatagatgaatccgcccaattttgccctcctaagtctttaagtgctttacgatgtatgaaaagtgaaatcaagtagagaatgccaacaccaattacgtatgagtatttgtaattataccttatattgaattcataacttactccacaaaatacgcctattactaaaagtgaaattaaaataagctttatgtctttactgcttgtcctagacattttctgagccttatgcatttgcatcctaattgatattagcaatataaaatagataatcagcataacaaaaatcatagcttttgttctcacctctataaatatcaattccttttttaattaaatatgtaatcttttctatattataacatatccaacacttttatcataaacacagctcaagggtatatatatttattagtcgcaataattatcaagtgaagctatttttgtttaatttttgttatttatctctatgttttattgacaaatagtataaattaaatatataattagttagaaatctaacaaaactataggagtataacaatggaggacaatatacgtattggtaaaatcatacttaacctttccaataaaattagcagacagttaaataaagaggcttcggcttttgggcttacaggtgttcaggctaagcttattggttttattcatcatagatcatctacacaagacatatttcaaaaggatattgaagaagagtttgatattaggcgttcttcagttacaagtgcacttcaacttatggagaaaaaaggatatatcaaaagagttagtgtctcggatgatgcacgtctaaaaaaaatagttcttactgaaaaaggcttggaactagataagaaggtgtatgacgctattatcaaattagaaaactccttaataaatgaatttgataatgatgagcttcacgtattaattgattcactcgatagaatttcaaaaaaaattgttgattagtcgcaatttttttttgcactattagttagaaacctaacaaaaggaggatatttatgataaagaaattagtaagctacataaaagagtttaaaaaagccactattgttacaccaatatttgttataggtgaagtagctatggaagttattattccactattgatgtctaaaataattgacaatggcgtaggaaaaggaaatatacaatatgtatgtatcgttggagctattatgataatagcagcttttgcatctttatccttcggcgccctagctggtaaatatgcagctaaggcctctgccggatttgctagaaacttgagaaagggtatgtattacaacatacaggacttttctttctcgaatatagacaagtattctacagctggtttgataaccagattaaccaccgatgttacaaatgttcaaaacgcatttcaaatgataataagaatgtttgcaagagcccctattatgctaatttcggccatggctatgtgtttttatataaattctaagctgtccctagtatttttaggtgcaattatttttcttggcatattcttgtacttcataatgaccacagttcacccatatttcaaaagagtttttaaaaagtatgatgaattaaatgccagtgtacaagaaaacctaactgcaattcgtgccgtaaaagcttatgttagggaagaacatgaagttgataagtttcattcagcttctgatatcttgtataaatactttgtaaaagcagagaagattattatactaaatgctccactaatgcagtttacagtatatacttgtattttgcttttatcctggcttggagcaaaaatgattgtcacaaaatccatgacaactggccaattaatgagtttattcacatatacaactaacataatgataagtttaatggttatttctatggtatttgtaatggtaattatggcaaaatcctctgctgaaagaattgtagaggttttagatgaaaagagtactttatctaatggtgaagatcctatatacgaggtaaaggatggatcaatatgctttaataacgttgatttcggatactctaaagataatatgcttttaaggaatgtagatataaaaattaattctggtgaaactataggtatcataggaggaaccggaagcgcaaaatccactttcgttcaacttattccaagattatatgatgtaacaaacggttctattaaagttggtggactagatgttagaaagtacgatatagaaaccctcagaaatgaagtttccatggtgcttcaaaaaaatgtgttattttcaggtagcataaaagaaaacctaagatggggaaataaaaacgcttctgatgaagaacttgttgaggcatgtaggcaagctcaagcagaggaattcatagaaactctccctaataaatacgacaccttcattgaagaaggcggaaacaatgtctccggtggtcaaaaacaaagactttgtattgcgagagccttactaaaaaaacccaagatacttattttggatgattctacaagtgctgtagatacaaaaactgatgccttaattagaaaggcttttaagcagactatacctgataccacaaaacttataattgcacaacgtatatcttccgttgaagatgctgatagaattattgttttaaatgatggtaaaatagacgcttttgatactcatgaaaatttgataaaaacaaataacatctatagagaagtctacgaatctcagatgaagggatatgatagtgatgaagaaaaataatgctccaaaaggatcaccactaaaaacactaaaaagattattactatacgtatttacacaatataagttattattttttgtagtaattttcactatctttataagtgccatttctaacgtagttggtacattgtttataaggaatttaattgatgactatataactccgcttttaaaggcaccagtaaaagattttggtcctcttctaaagattgtgcttacaatgggattaatctactacgtaggtgttttgtcaacatatatatatagccgcttaatggtttcaataactcaaggctcccttaaaagattacgagatgagatttttaagcacatggagtccttgccaataagtttttttgatacacatgctcacggagatataatgagcatatacacaaatgataccgattcacttagacaaatgattgaacaaggtataccacaacttctttcaggcgccgtaactattattggtacattaatttctatgatatatttaagcattccccttacaattcttcaggtgataattatacttgtaatactttatgtaactaaggtcatcggctctaaaagcggaaaatacttcaagcttcagcaaaaggatttaggtgttgtaaacggatatattcaagagatgatggaggggcaaaaggtagtaaaggtattttgtcatgaggaggaagcaaaacttaaatttgatgaactaaatgacaaactttatgatagcgctaataatgcaaataaatttgcaaatatacttatgcctattatggctaacataggttatataaattatgtactagttgccatctttggttctgtactagccataggaaacttttggggctttacccttggtgctatcgcatctttcttacaacttactagaatatttagtcaaacaaccaatcagttatctcagcaatttaactttatagtgatggcattagctggagctgagcgtatctttaagcttatagatgagccagcagaaacagatgaaggctatgttaccttggttaatgcaaaagaaaatgaaaatggacaattatctgaaactaatgagcatacgggtacctgggcatggaaacaccctcacagtgatgggtcaacgacatttacaaagcttcttggcgatgtagtctttgaaaatgttgatttcggatataattctgaaaaagtaatactacacagcataaatctttatgcaaaaccaggagaaaaagtagcttttgtaggtgctactggagccggaaaaactaccataactaatttgattaaccgtttctatgacattaatgccggtaagatacgatatgatggtattaatatagaaaaaattaaaaaagacgatttaagaagatcacttggagtagtgcttcaagatcctcatttatttacaggaacagttgctgataatattagatatggtaagttagacgcaacagatgaagaggtaattgctgccgctaagcttgcaaacgctgatcagtttataaatcatctgccaaatggatacgatacaattcttacaggtgatggtgctaatatctcacaaggccaaaaacaacttcttacaatagcaagagctgccattgctgatcctcctgttttaattttggatgaagctacttcaagtatcgatactagaacagaagccattgttcaagatggaatggataagcttatgcatggaaggactgttttcgtaattgcacataggctttcaactgtaaaaaactcagatgtaataatggttcttgaacaaggacgaataattgaaagaggaagtcatgatgacttaataatgcaaaaaggaaagtactatcaactttataccggagcttttgaactatcatagcaaaaataggagtgattcactcctatttttgctttttattataaaatactatgaacctaagaacctatatgagcatatattgtttatattgaaacacttgtgcaggagcaaatcaatgatattaaatccacaaaaactttctgtagattttggaaatggcataacagctactgaacctattattcctagacgctacactcttactcactcagatataactgcaaaactctttcttaatattggattaacttatgcctataataaaatgaccactatgagagatgaggtacttggagaatgggtaaaaaaatctcaagattactcttatcaagtattcttacatgtagacggaagacttggtcctaagacaacagccataagaaataaaatctttagacgtgagctacctcttgctttagaagctataagatacggagataaaagattctttaacgcccatccatacttagacaatgcaccaataacagtttttttcatatcaactaatccaaacttcaataaaatagagaactggggtactttttcagattataatatagaatcttattacaggaattataaaaacgtttatctacttgatagaaaggtaggagatgtaactggagatgatattcctgatacagtatccttatatggagaaaaagaagctccctctgaaatttttgccgacgacataactgttattattacagatggtagcacaggcaatactacaactattacaccagaatttaactcaggatataatcctacaatatttctcggtgattttactaaaaacagagtttacgatataaaaataagcattgattctggtggaagtggaggctacggtttcttttatatttattcctttatggaaaatacttttcgagaaatctttaactttgacgcatacaataaagaatataaatacaaagtagactatgatgatctttacaaagttaatgtaggtgctattacactaaataagcttttcatattagatataagctacaagggatatgatgttctatctcaatactattatgaaaacggtaaattaataaaacctgtggatggtgatgttcttgccctaggagcattagttcctattgtaagcaatgagcttctagatttttataacttacttgcattccagcgcataataggtacctacaatgctgataccttgggatatgtacaaaatcttttatcctgggatggaaaaaacttcactccttctagtactttcgtaaatatatctggttcaagcttaatttccccatattaaaaatataaatttaatgccctctatatacacaatactgtgagggcatttaacttgttattttacttatctttcttcattaccataaaataataatctgttccatactctctattaaatcttctttcaagttctcttaatgtttgttcctgttcatctgctaactctgcatattcaagctcacttaacttattcaaatattcattcttcatttaatcaccacctcttcttatattttttatctgaaaacatcacatataattattatttctttatctaaaatagatattctatattttagataataaaaaacactgcgcacaatgtatgtgaacagtgttttaattaacaatttatttttctaaatactttgttatccaatccttaatttcctttgttaccttttctctttcgttttccgttggatccttaaattcaatctctccaataaaagtatttccttttaaagcttcctctaatttttcaaaacatttttttgcaccaccaccaccatgacaagcaaaaaatgcaatcctcttatttttcatttgtacacttgatataaaggtgtttattggtggtgcataagtccctgcccaaactggagttccaattattatggtatcatactcatccatacttggaatcttattttgcaagtttggcttttccttaaatatggcacttttacctccccaaaaatattttttaaaaccagtcttaggaatttctttttcaggttttaactctaataaatcagaacctagattatttcctataatatcagcaatgaactttgtatgaccttctagtgaataaaatactattaaacttttcattttcttactccttatttaacttactaaaatatatactatttatagttttcttcactgttttttaatatattctttgctatctttttcataagccttaaaaactcttctctttcttcataagtgtctagtgcttctattacatttccaaaagtttcttcttcaaatttaatgtgttccttttgagcttttttacccttttcagtaagaactaatctatatgatcgtctatccctactacttatggatctaactatgaacccttttttctccaatctatcaatcatacttgtaagtgtacttttaggaagtcttagtacttctaaaatatcttttattataacttcttctttttcagaaattatccttattacagaaatttcagtggtactaagcttcttaatagttgtatatctctgctctgcatctttatgcttagatccagcaatcatattgtgccatagttcatgaaactcttttacttgccttttgtattcctcgtccatactgttgtcacctcagtttattatcatcttatcttagcgtttactgcaaaactaccatgatttatgtgaataaaattaaaaggttcaaacccgcactctttcataatattttcaatttctttcttagagtatagtttataatcccctttattagatattttacaatataaatttaatatttgtctataaattactggtgctgtcggatctcctataatcaatgttccatctttctttagtattcttttcatctcaattaaaacttttttagggtttggataatgatgaaaggatgcattacatacaataacatcaaatgaattactcttccacggcatgttttctgaatctccaagcttcagctctgcacgacccttaagatttttcttcgctatttcgatcattttttctgataaatctaacccatataggcttaaattttcatctttagctagtatttttaatacattcccagtaccacaaccaacatccaatactgttttagggttagctcttagaattctctttataatttcatcgtacattggtgctacaaatttcccatcatgactttcatcatatatatcagctgttttattaaaattttcccttgatttttctttaaaaatttcgttattgttttccataataaatccctccaaataatccgatataaatattatacgatattcgtactatatttatatcgtactacttatccttttctaaatcaagacctaaatgtaatattttacaaaagtattacaaatttttctcagtgccttaagaaaccaagttcaactactaaattacgcatgtaccataatgctttaatgatagcattttggtacatgtgtaatttaagtttcacttttggtttcttatatattatacttaatttattacatttaataatggcaattggggctaggttgtggcgtccgtgtattgcttaagattaggaggaattttatgttacgttttgattgtgattatactgagggggctcatcctaaaatattagaaaagcttactataacaaattatgagcaaacaataggctatggggaagatcaatattgtagggaagctgcaaatataataaaaaagaagtgccaacgtgaagacgtcgatgttcactttttagttggaggaactcaaacgaaccttacagtaatttcagctgccttgagacctcaccaaggagcaattactgtagtaactggccatgttaatactcatgaaactggtgctatagaagccactggtcacaaggtgcttactgtggaagataatgaaggtaagataactgctaaacaaatacaggatgtttatgatagtcattttaatgatgcatctcctgaacatactgtacaacctaagatggtttatatttcaaatccaactgaaataggaacaatatattcaaaagcagagcttacttctataagtgaaacctgcagaaaaaataatcttatactatacatagatggtgctagattaggttatgggctttgtgctgaaaataatgacttagatttaccaactatagctaagctttgtgatgctttctatattggaggtaccaaggtaggtgctttattcggagaagctttagttatatcaaatgaagctttaaaatctgattttcgttatttcattaaacaaaaaggtggtctattagcaaaaggaagacttcttggtatacaattcgcaactttatttgaagatgacttatattttgagatatcaagacatgcagacgaaatggcaacattaataaatgatgcctgcaataaaaagggatattcatttctatctccttcaactactaatcagcagttccctgtattacctgattctgtcattgaaaagttaaaacaagattatgccttttcttattgggaacgagttaataaaactcacagtgctgttcgcttctgtacaagttgggcaactaaaaaagaatccgtattaaaattagtagacgctatcgagaaggcttaaaatttataaataaaaaatgtggtgtaccttatagttcaccacatttttaactttacaatattctaaaattcttttgcctgctcttttgccttttcaattgtatttctcaaaattccttctacatcttcacctacaacatccaacttttctgctactatagttgtaaaatcagttatacccaaaaatccaaatattgttcgtaagtatctatctcccatttcatacatttcaaatggcccttctgaatatccaccacctctagaaactatatgaactgcttttttcccctgacatagtccaactgctccttcttctgtatacttaaaagtaatacctgtaacacatatataatcaatgtacgcctttaatatggctggaaaacttaaattccaaaatggcgctgcaattacatatttatcagcttctgcaaattgatatgcatattttaaaacatgatggtccttaccttctccctgctttggaacatgaagctttatagcctcttctgttaaaaagcttattccttctttatataagtctagtgttataatttcatcattaggtttttgatttctgtattcctcaataaaactgtcagatattttaaatgtcctagaaactccctctggtttcgcatttgccttaatatataataccttactcatgctttcactcccttggctttttaatattattataagtagatttactgcgaaaaatacatccataggtgctttcatgcaaaattggcacattaataattacttatatggtaatataaaaaagacatagatacttaaatatttaactgcagatagaaaaatcatacttttgaaaacgtttagtgatgtatattaaggaggacgcttaaaatgcataagataaaaatcccactggtggagaaaataagttatggcttaggtgacactgcttcaattttgacttttcaaatggtttcagtttatatcatgttcttttatactgatgtttttggactttcaaccgcttctattgctgtattacttttatctgcaagaattatcgatgctcttatagatccaattataggaataataatagataaaacctccacaaaatggggtaagtgccgaccttattttctatggttttcagtaccctatggtttaattgcaatagcaacctttttcactccacatttaagtacaaatggtaaacttatttatgcttatattacttatatatctttaaatatagtttattctattataaatcttcctataaccgctatacttccaagtctaactgatgattacaaagaaagaactcaaactacagctatacgtatatttttagccagctgtggttcaataatagtgagtaccttcacactacctcttgtaagtattttgggtgaaggcaacaaacaaaagggattctttctcactatggtattgtttggatttatagcaagccttctatttgtaaatacctttatccaaacccatgaaagaattttagcaaacaaaggaaatccaatacctctaaaaaaaagtattatgactctcaaaaatcttccttggttacttattaccttagtaaatgtatttacatatatagggctcaatattaaaaattccagtatggtttattatttaagttataatatttctcgacaagatttgattcaaatatttatgtttgtaagtactataggcgttcttccagctattgcacttacaccaattcttgtaaccaaaattggtaaaagaaatacattaatagtagggactctttttgtccttataagctgttttttatttgcaatatcaagtaatgttattctacttttaatagcagatggtattagcgccttaggaagcggattttccaatgctgttaccttttcaatgcttcctgacatagttgattatggagaatggaaaacaggtgtgcgtgctcaaggacttctttcatcttcgtcaagttttggttcaaaatttggtatgggtgtaggctccggacttgcagctttgattctctcacttgggcattatgttccacatgcttcccaagcctattcagcaaaatttgctatatcctttaatttcatatgggcttccgcaattacatctggaataatattatttgtactgcctttttataaaatagacaagctatatccaatgattcaagcctatttatctaaaaaaggagagcttgatcattaatctaaatttttatatatactatttacatttaattggttatataatacaattcatgtaagaggattaatttttttccattgttatcctcttatgcttttagattaggggggatgtcttatgaaaaatttcaaagacagacaatttaaagggtggtttactacctaaactttggtgataatccatctttatttatactgagaggtggaaatttaaatgactttaagaaatatagatacagataggctacttttgatgcctgtaaccttagaaatagttaaatccttaatggttggaagcaatgatgagcttttgaaacttcaaattaatccaaacacaaaatggcctaccaaggatacaaaagatattttaccaataataaatagaactcttgaaaagaacaaagtaccaagtggttttgaaacttggatgattataaaaaaagacaacatgcaagtgattggagatattggttttcacagtgagcctaatgaaaaaggagaagttgaagttgggtattgcttagtagaagatgaaagaggtaagggttttggttttgaagcgttaagcgctattatggattggatacactttcaaaagaacgtttcaattgtaaaagcacaatgtttaattgaaaacaagccttctgctcgaatactccaaaaagtaggtatgaaggaaatcgatagagatatggattcaatttactgggagtttatcaaaccagtatcataataaaattttaaatatagcctttgcattaatttactcaatgcaaaggctataatattaaattcatataaccctatggtcaaaacaatcaattatatagctttaagtagtcatgtaatggtatactaaaagaaaatgtgttttatgaacagaaggtgtttataaatgggtaatgctacaattttaacagaacttgaaaaggtaatcttaaataaaatacaaaattatattaataagaatgaaaaggttggtatagatataatagcaaaggaatgctttgtttcaaaatcagcaattataaagttatctaaaaaacttggttatagtggctacagtgaaatgtattatactattctttcaaccgctaataatgcacaaaaactagatttctctaataatagcataagtgtaaatgatcacttaaaagaaaatgttgatatgcttgtagaaatattgaggcaatttaaagataagaaaatctatttagattcattaggtctttgtgatagtgccaaagaatattacttgcaaaaattattaatatttggatttgatgcagccagcagttatcattatgaggcatttagaaataataaatctggactttactttttcttttcctactctggatatcgagctgagattattgaaaaagttaatgaagctattagtaatgattttacggttgtagcctttacttctaataaagaatcaccactagcaaaaattgcacattcaacagtagaagtctctggagtgaaatctgatatggaacactacttaccaaacttctttaccgctaatttaataatcttattagaattagtattaggtgaatactccaaaagatacttgcacaaagaaaaagactagatatatataaaaatgggctagcaataggaattgctagcccatttttgtatttataaggtagtaaacttttttactttaagtaaacattttcacaagcatgaaaactgtattgatgcagaagataaactaggttatattgtagataaataaaaaaaggaggtattatctcatgaaagaaaaattgttatcattaagtcaaaagttttcacaagctgcagtacaaccagtcatgtttttaacagttatgggaattggtcttgcagtagctgttattatgcaacttagttttatgccatcatttatagtttttataggtgtactgctaaagaaaatgatggatgctatgcttaataatctttctattatcttttgcgttggattaacaacagcctttgccaaaaagaaaaaggtggatgcggctatcatcgcattaatcgtttacattatatttctggcgggtaataatgcttggcttacatcacaaaatatgttagccaaatcaggagccatggggctatttggaactggtcaaaatactgtattaggatttcaagtaatcgatatgaatgtattcttaggtatattattaggatgtattactggatatgtgtttaacaaattttccgaaatagaatttggtgatatgtttagaatttatggcggatcaagatttgtatttatagttatgattcctattaccttagtattagcaattcttctcagctatgtatggccagttataaattatggtattaatggtttatcaggtttcatgaaaacagcaggtgctttaggtgtatttgtatattcatttggtaatagatttttaattccaacgggattacatcatttattatggatgccattttgtttcacaggaattggtggaagcttgaatattgatggaaaaactatacagggcgctgttaatattttttattctgaaatgagtaatagtagcaagcttacagctattgatccatcaataagatttgcaacctttggatttgcaaaaatttttggaagcataggtattgtccttgctatgataagaaccgcaaaacctaaaaataaaaaagccgtaaaaggattacttataccatctcttttcgttgcagttgtagctggaatcacagaaccccttgacttttcatttcttttcatatctccactgctttggttagtacatggtataatcaccggtttttcagaaatgctgctatggattttaggttcaagaacatattcaatttatggtctactagatacaatagtttgcaattctgtaataagcccaaaactctctaaaatatatattttcttcgcagttggtatcataatgactgctgtatggtattttgtctttgttttcttaattagaaaattcaatattaaaacacctggcagagaagattcagttaacagctcttcaaacaaagaggtaactgatggttcttctaaaagtggtagtagcgatcaagattctgaactatttattaaaggattaggtggagctgaaaatatcctagaggttaataactgttttacacgtttaaggatcgatgtaaaggatgtcagcaaggtaaacaaagagataataggaaaagctcaacaaaagggtattgttgttaaaggtaataatgtacagattattattggaatgactgtagaaaattcaaaggaaaatctagttaacttattagataaaatgaaaggggtaatgtaaaatgaaaaagtattcaatttgtattgttggtggaggaagtcgttatactccagatatgcttgctatgctatgtaaccaaaaagaaagattcccattaaggaagattgttctatatgataatgaaagcgaacgtcaagaaacagtaggaaactatgcaaaaatattgtttaaagaatactatccggaattagaagaagtaatatggaccactgacgaaaaagaagcgttcgaagacatagattttgctcttatgcaaattcgtgcaggaagactaaagatgcgtgaaaaagatgaaaaaatttcattaaagcatggctgtcttggtcaggaaacttgtggggcaggtggatttgcatacgggcttagaagtgttccagctgttattgatttaataaaaagtatcagaacttattctcccaagtgttggattttaaattattctaatcctgctgcaattgttgccgaagcaactaaaagagtattcccaaacgattatcgtataattaatatttgtgatatgccaattgcaattatggatatctatgctgcagtacttggattaaaaagaagagacttagaaccaaaatatttcggattaaatcattttggatggttcacacatatcttagataaaaaaacaggagaaaattatttacctaagttaagagaaattttaaaaactccagtagatgttcaaacagaacctctttttcaagagaaatcttggaaatcaacttttgagtttatgagtcaaatgataaatgattatgatgaatatttaccaaacacatatcttcagtattatttataccctgcaaaaatgagaaataaggaaaatccagaatacacaagggctaatgaagtaatggatggaaatgaaaaagaaacctatgaaagaatgcataaaattatatccttaggaaaaattcatggcactaagtatgaacttactagtgatgtaggatgtcatgctgagtatatagttgatttagcaacggccattgctaataatacaaatgaaattttcttaataattacagaaaataagggcactattaataatgtttcaaaagatatgatggtagaagttccatgccgagttggaagcaatggagttgaaccattagttgttggaagtatccctgccttttataaaggccttatggaaaatcagtatgcctatgaaaagttatcagttgatgcttgcttagaaggaagttatcaaaaagcattacaagcacttgttttaaaccgtacagttgtaaatactgatgttgctaaagaattactaaaagatttaattgaagctaataaaggttattggaatgaacttcattaaattttagacaacctgtagtataataattgaatattcttgattgtagttaattaatacaatcaagaatgttcttataaaatcatggggagatgtatatatgtttaaaaaattattttcaaaaaatagtaatagggttgaatcagtatttgcttatgcatcaggaaaacttttaaatattgaagatgttcctgatcctatttttagtgaaaagtctatgggagaaggtgttgcaatactaccatcagatggaagaattgttgctcctgtagatggcgagattatattaattgcaccaacaaaacatgctttagccttaaaaacaactcttggacaagaaatacttattcatattggactagaaactgtaatgcttaacggacaaggcattgaacttcttataggcttaggagataaagtcgtagcagggcagaatatcgctaatattgatttggattttatcaagaaaaatgcaagtagtacagtgattccaatggtaattacaaatagtgaagaagatctctttgattttgagtgggaggatgttaacgaagtaagtgctggagaaacaaaaatattcaaggctagttgtaaatagttttgatatccgacgaatattaaaaagaacgcccaattacaaaggcgttctttttatacatattttaatatttaaccttgcataaacattttcatatcatcttctacattagtgattccaccaattccaaagttatctactaatacctttgccacatttggtgaaaggaatgctggtagtgttggtcctaaatgaatatttttaactcccaagtgtaataacgataataatactattacagctttttgctcataccaagctatgttatatgatataggaagctcatttacactcttcaatctaaatacctcttgcagtttaagtgctataacaactaaggaatatgaatcattacattgtccagcatctaaaactcttggaattccaccgatatctcctaggttaagcttgttgtatttatatttcgcacaacctgctgttaatataactgtatccttaggcaatttttcagcaaattctgtatagtaatttcttgaattagctcttccgtcacatccagccattacgaaaaatctctttatagcccccgatttaactgcagctacaaccttatccgcaagcgctataacttgattatgtgcaaatccaccaactatctgtcccttttctatttctgtaggtgcactgcatttcttagccatttttataacttctgagaaatcctttgttccatcagctttagcttctatatgaggacacccaggcatacctgtagctcctgttgtaaacagtctatttttgtaggaagcctttggtataactatacagttagtagtcatcactatagggccattaaacttctcaaattcttctttttgtttccaccacgcattaccataattccctgcaaagtttttatactttttaaactttggataatattgtccagcaagcatttctccatgagtatatacgtctactcctgttccctctgtttgctcaagtaacatttctaaatctctcaaatcgtgtcctgaaatcaatattcctggattttttctaactccaatatcaacagtagttatttcaggatttccgtaggtttcagtatttgctttgtcaagaagcgccattccatttacaccgaacttaccagcttcaagtgccaaggcaactaattgatctacgcttaaactgtcatctaaagttgctgccaatgcttttgccataaattcatgaacagtttcatcatcatactttaagttcatagcatgcttcatgtaggctgataaaccttttaatccataagtaattaattctctaagacttcttatatcttcattttctgttgaaagcactccaaccttttcagctttcgcatcaaattctattacattgtccgcagtccaagttgcagcatctggtcctaccatttcttcttttgcaattccaaataacttcttaaagaaacctccacttaccttaacttcccctacttttccaccagccttaacaaccttagcctttaaatcttctcttattcttaaagtttctctcactctatctaaaatagaatctctatcaaaattagcattagttattgttgtaaataggttctctactatatatttattaaccttgctgtctttaacccctaccttcattccttcattgctaactactgctagtcctttagttacatatattaataaatcttgagcttttgctacactttcatccttaccacaaacgcccttaaccgtacatcctttgcatcctgcagtttcttgacattgataacaaaacattgacatagtttgtcctcctattttctctttctatataaaaattaataatttcttgcttcagtgatttaaagtttactatattcctttcaagttttctgtaacattggttactaatttaaaataaaaaaaatgcaccatcgaagtatattttcaatgatgcatttaaatattatttttgaacatgaattattcccttttctatagctttagcaaccgcttctgatctagaagaaacctgaagcttactgtaaatattagtcaggtgtgcctttactgttctttctgatatccccatatcaaaagctatttctttactcttacagccccttgctattgactgtagaataaacagttccctctctgtaattgatgcattaaaggaggtatttattgtactttctttctttttaacattaaataatactttacttacttctggttgaagtaataattctcccctaaatgctgattcaactgttcttataagttcctccctagtagtatccttaagaagatacccctttgctcctagtgaaagcccctcttttattaaattatcctcattatatgtagttaaaataattattggaatagaattttctttttcctttaaagcttttagtacatctagtccactcattttaggcatacttaaatccattaaaatcacatctggcttaagttcatctataagtaataacgcctgttcaccattttcagcttcaccaacaacctcgtactcatcttctaactcaaaaatgagctttaacccctctctaactacaaagtgatcatctaccactagtattcttcttttactcattttcttttaatattcctttctcaattggtattataatacttacattagtacccaatctcttcttactttttatttcaatttcacccttaatactacgaactcgttcagttatcccaagtatgccataatgtccatatactttattcaagctttctacttcaaagcctataccatcatctattacttctacctttatttcgctactctcctctattatcttgagctgtacattttcagcttttgcatgctttgcaatattatttaaacattctctaattatatataaaaggtgctccaatatttttgttgtaatttgagatttcatttgtatatcaacttcaacttcactacttgaaaggtttctaaatttactcacttcacttttcactaaatcaataaaatcaccatttaaatctgtttctgaccttaaatcttctataacaagtcttgaatctgccagtgtttttctagcatgttccatagcttttaatacaatttcttgagcccttttattattattcttatttaaattggcgtttaccgcctcaagctgcattattattcctgcaataccttgagaaagtgtatcgtgcaaatctctagccattctttgtctttcattagttaaggttaattcttccactttatcataagccagttctagttcctttaaaaccttttgtgtttgaattcttaattttacttgcttaaaaaatatagctgagtatccaattacaaaaataattattataagaaatactggtattaattccggcaaatagtatgcaccattaattattacaacagtaccacaaaatattgagtacaagaaaataaaagtcaatataattttaaaaatattataatataattctacactttgagacattaaaataggtataatacctataaataatgcatgatatcctttttgaattaaaaacgcacatgcacaaataattattccttgaattaaaaaatatatccaatatctatttttaaaaatataagaaaaccaatacattataaaaaataaaatcattattaaggtaaatattatactttgaaataaataaatttctttaatattttgtaaaaacaaagaaaatacacaaactagaataatacaaattattgataaaagtctaaaatttaatttttcttcatcatatgatttactagccatcctttcacttccttcatttatacataataacataaatcaaccattaaaataaaagaactatagattataatacaacactatagttccttcatttatatgttcttaactagctttttcttctttaattattgattcaccttcaatatctatattaggaagaattctatctaaccattttggcatataccatgcttttttacctaatagtatcataacagctggtacaaaagtcattcttataacaaatgcatcaaatagtactccaaaagcaagggtaatacccatttcctttacgtttgcatctacattgaaagcaaatcctaagaaaacagctgtcattatcaatgctgctgatgttactactttaccactattttttattcctagaataacagattttcttgcatctcctgtttgagtataactttctctcatacgacttactaagaatacctcataatccattgctaaaccaaataaaattcctgttactaatataggtaaaaaacataatatcggctcacgagctgctacattaaacaatccagctaaatgaccattttgtaaaacaataactccaaatcctaaagttgaaagtatagtcattaaaaaacctaaaacagccttaattggtaccaatatggatctaaaaactaaaaccattaaaattattgcaagcccaacaataactaaaataaatttaggcataactttacttaatgtaacatctgtatctatatttactgcagtagctcccgtttccataagatcaacttttttatatttccttatgttttcagacttttcgtttatagccttaactaattcctttgtttctttatcatttggaccacttttaggtactaaatttatcattgccaacttgttgttaccaactggaatagggggtgtaatagattttatgtttggtaattttccaatttccttttctatttcttgaagtgtaatcatataatttccttttactttggaagcatcagctaccaaaataagaggcccattaacaccttttccaaatccctctgccataatatcataacccttacgttctgttgattctatcggttttgatcctttatctggaattcctaattccaagttaagagcctgataactaaataaagcagttactatcaccacagctattgctataactgctggatgcttgcttacaatacttccccatttgctatcttccttgtttttgtatttagatgattttataatattaaatattttattttttttataaatacttatgcgatcttttgcaatacttataaacgctggaactgctgttaatgatgaaattatcgcaagcaatacaactgctgctgcatctaagcccatagttcttaaaaaaggaactccaactaatgataaaccactaagcgcaataataactgttactcctgcaaataaaaccgaactacctgctgttgccatagccctagctaatgattcttgcctatcatatccttcagcaagattttctctatatctagaaattataaatagagcataatctattcctactgcaagtcctatcattgctgctaaagataatgaaaatataagcgtatctactgaattagatgatataaatatacataatactcctgatgccaatcctacagctgctgttgctattggcattaatgctgccataaataatctaaatgtaatcaatagtacaataaacgctattgcaagaccaactgcatctgaaggtccaactgcttctattcctgaaaacgcaacatctcctcctaattctgtttgaattcccgcatctcttgttattttaatattattaaaaactatgttcttatctttttctgtaacctcttcattcttaatgttataagttatatcagcataagcaatttttttatttttacttatagtccccattgcatatgggtctgatatgtacataacttttttatcttttccttgtatcttagtctttagtttatttatagctatttttacagatggtgtcattaaatccttacctttttccactttaaaaataagccttatagtagtcgttttattacttgatttactttgactttctgtagccttttttaacatattaccagctttttcagacttgcttccaggtatagaaaaattatcactaaattttatacctgtatttaatacagcaacacctaaaatagctagaaaaactacccacgccacaataactcttttaggccttttataaacccaacttcctaaattgtacaataattttgccattattaatcctccctttaaaacacaaagcctttacaaatttataaggcctatgtatttattttataaagaattaaatgcttaaacaattgtaccttagggcaaaaatgggtgtacctttaggctacttttctactttcttacaagaaacttcttaatttcatcaaaggctaaatctatccttcctacttgacagtgctgctctccacctgtttccttagtaaaaattttctttgttatatttgcatttacaagtctatcttcaaaaagcttcatagcctcaattggcacatactgatcttcctctcctgcaagaagaagcacatcttgatctattaattcctctataccatccatagtgtgaagctgaatagctttaagaaaatcgtatggtgtataagtcatagtgttatccattccttttgatattttccaattaaagtcaatatctgctttcattttggaatacataagctcattaatcttatctttttcattattattaagtagcttttctaactcatatctcatttccttgttcttcatacctataacatccataccgcagtaaaatatatcatatacaatagctgccttaattctcttttcaaatgctgctgctctaagacaaaaatatccaccccatgaacatcctaatatagtaacttcatttaaattaaaataatctaaaagagctgatactggcctctcccaattatgaatgaactttaatccattcttcaatgccattccttgtcctgggccttcaaatgcaataatatcatatcctaaattctcaaatgcactgaaaaatggcagcatttcttctaaacaagaatcataacctccatgaaaaattaaagttttagttgaaccttgaaatttaactcgaactgctggaaaaaatgaatcttcatagggtacattgaaatgttctaatggtactcctttataactcttataataattttctctatactttgtatacatataagctttatttggatcactttctcttaagtaaaaacttcctgctgcataataagctgacgctaattcaaattttccttttatttcacttttctctgcaagctttctccaagctatataccaagaattcatatcttttatatttagcaaagccttttcaatatcatttttaacctcagaatcctccataaactttcctaaaaaacgattaagttgaaaattaaattgttcattatctaaatattttttaaacatcataaaccactccttacttcttaaatcttatacgtcaagtacaaatgattatcattatcacttaaatagatgatttatatggttttgtaggttatcatacataccacattaaaaatgtacgataacctgctttttaatacatattgactgctaataactatccttttatagtataattattaagaatattatcttgggggggggatttttcgtggcaaaaatggatcttagagtattaaagacgcaaaaaaacataaaaactgccttatgtaacctactggtacataaagctttcaaggatattacagttcaaaatatttgtgataaagccttagttagccgctcaaccttttatgaccactattacgataaatacgatttgcttagtaaaatagcagaagaaatcatatctgaattcaaaccttatcttaagcatagattcaatttaaatccgcctgatagcttcattagtataggtgcatatattattaaatatttttcagaaaataaaaatattatacaagctttatttagtattcataatgaatccattgatatatacaatgattttaaagccatacttatacaggaatgttcctcttatctaaaacgtgaaaatttcataagtaaatttaatgtatcaaacgattatatatgtgctcactatgcctcatatgtgttaacctcttttgaattatggctaaaattaggtgagaatgatgctgactttagattggccaataaattccaagccattctatttgaaagttctacttaaatcttatttttttctctagttcttctagccttttttgctcttttttacttaaccttgatatatatatattaaactcaacataccattccttttcatagtcttttttagccgctacttcttttatatacgcaagtaaaataataatttcaagctgtgataagctcttaaagtattctatatattcagctttaaataaacaatcccctccaagcatatcagttaagtcttccaaacttttaataccactttttattaaatctatcttttcattcacaagcgtgcatcctaatatttttttatttagcttcctaaattctgaattactcatttttataccatcagtataataaattatttgatgataatcattgctcttaaatgacacaaatacagtttctaatctatttaatttaatatttatacttaaaagtgaactgaatttaaaagcagcttttctaacataacaaagtagatttttatttttaatatttaagttaatacaacatgcttctgctgtctttactagttcattctgtaattcttctagagctaattttttcaatttgctttttatatattccctatctaattcactaatattaaggctacctaaatcccttccacaaataatcactccaagtgaatttcttaaaactagttcaaatacatttatgagcaatgctttattttcttcatgatatccttttaaaacctcatttacttcatcaattttgaatttattgcaaaactcattttctaaacttaaatttattagatagttgtacatatattcaatgccagtatagttcatatcatcaaaataaagttgataatctatacaacctggggcttcatgcgctgtaaatttatactcgtattcattaaaaaactctgaaattccatggtcaatagtatcgtcatatgtgtaattttcaatattaagtttacctatattatgaaaaaggattttgctatccgatatttttttctctattaccgcttctccccttaatagcatttcctttaaacttaattcttttaattcatttaaaataagcttaatactattaaaggtctttaaataaatgcctatagtgtagtcaatggattttaaaatactttttaaagcttctatcctaactgaactactttcattcctagtgtaataggttaacttattttttaaaatttctattctttcataataaatcttctcaaaatcctctttatttaacagcttttttttataggaataagttaaaatatactcgaagaaattttctttattaaaatgctttcttatgtcaaaattatattcttcaattgtattactactctccataaacatcattccttttcatcctccaaatttgcataatccttaaatccacttcttatattgttggcaatcttatataaaactgtcccttctaacaattctaatgaccctctgcaatgattatcaaacttttctttcataatttctattgcctcatcatcacttatataatctaaggtctcattcttaaaattataaaaaatttctataagttcattcattgtctcactataattttgttgtgatatgtaaggagaatcacaaaatgtagtaataattttatttataatttgatttccaaattctatcctgccatttttgacaagagcatcacttcttgtttttataatctctcttacatcttcttcataaagttttaaaccgtactttatggtgaattcattacaattaactatttcattaaaagtttgattttctagcaaatttttttgaaatacctctataaaatttttcatatttaaagctcccttcaaaaaagtattgacttttctttttaggtgtgatatagtatagttggttatttattttaacaattcaagtatattcttttcttaataatatgtcaatgttctatttttcatttcaaattttatatttcatatttaaaacataatctttaataattactcctaaataattaaaactttcctcttacaaaaaaattatattatacgtttcatatttatacgtgttaattttaaagtcttaattgttttattcgtatatttttgtattaaatacttgattttacattttatgggtatataataaaagtgacctcattgtaaaagttagatttaactaattaaattctatcttgcgaaaacctttactgtgcatatataaaacgagtctcctaacattgtcgttactatacacttaaagtattgcttgaaaattaatactgttaaattttatttttatattgtataggtacttataatttaatgagtcctattacattaaaggaggattattatgaaaaagagatatcttacaattcttatgtcaacttttcttacaactggtgctgtactaagttacacaagtcttagtgcaaaggcagcccctactactaatgatgattatactttaaatataaatactgataataaattatttaatgaaagtgacatgcttacaggtttgttttttgaagatataaaccacggagcagacggaggattatattctgagctactacaaaatcaatcctttgaattcaaagattccctatcttcttggactgtagataaaacgggctcaacttcctcaactgctgaagtatgtacttctaagcctctaaatagcaacaatactcactatcttgaattaaattgtccggataataacagcagtttaaaactagtcaacagcggttacaaaggtataaccgtaaataacaatgctaaatatgatttttatttttgggctcgcaatgttggaaaaggaaataaagtaaccattcaacttgaagacgaaaatggaaatgctatttctgaagataaaaccataggtaaaataaatggtcaatggagaaaatacgaaggtcacttaagagccacaaaatccacctccaacgctaaacttgctgtatccataacgggtgaggcaaaaatgaatttagatatggtttctcttttcccacaggacacctggaaaaatagaaaatatggcttaagaaaagatttagtagagagacttaaggatttaaaacctagatttttaagattccctggcggatgcatagttgaaggtaatagcaaagaggaaatctacaactggaaggataccataggtaacgttgaagaaagaaaagaaaacacaaatctttggggctacaatcaatcatatggactaggtttttacgagtattttcagttatgtgaggatataggcgccactccagtacctgttttaaattgcggtatgacctgccaagcaagaggtgttaacggagtgccaaattatatggctccagttggtcctgaccttgatccttatatacaaaatgcggttgatttagttgaatacgctaatggtgatgcttccacttattggggcagaaaaagaatagaatctggtcacaaaaaaccattcaatttaaaatatatggccataggtaatgaacaatggggtcctgaatatcacaaacgctttgaagccttccaaaaagttttaaatcaaaaatgtcctggaataaccttgatatcaaatgctggtacaagtccatcaggctcaacctttgatgataattggaactggataaaagagaaagcacctaataccgtagttgatgagcattattacatgtctcctgattggttcttatccaataccaacagatacgataagtacgatagaaatagtaataaggtatttgttggtgagtatgcatctcagagcaataccttaaaatccgcattagctgaaggcgcttatcttactggacttgaaagaaattcagatattgtaaaaatggcatcctacgcaccgttatttgccaaagcagacgattatcagtggtctcctgatatgatttggtttaatggcaatactaactacgtaactccaaattataatgttcaaaaattattcagtacaaatttaggaactcaaattgtgaagggtgatcttataaagcctacggcacacgtaaaaaatgacattaaaggcggtgtactcttaggggcatggtcaactcaagttcaatatgataacgtaaaagtaactgataatactactggaaaagaaatctttagcgacagcttcgataataatattaatcagtggactagtgccagtggaaattgggttgtgaaagacggaaaactagaactagaccaaatagctgataattgcagaattttaaccaaagataatacctggagtaattacactttaagcgttgatgctaaaaaattaagtggcaaagagggtttccttgtaggctttggcgcaaaagattcttcaaacttttactggtataacataggtggttggggaaatacaaaaactgctgtggaaaaagaaactgatggtagtaaatctaccgttagtgaagctgatgcaaaatactcaactgtaactactggacaagattataaaataaaaattgttgttgatggcaataaggtaagttgttatctaaacggacaacttactaaccaatttacagcaccagagagagacactgatgtatacacttctactagttatgattcgaaaacaaatgaacttattgccaaggttgtaaatgttgctgatgaggatagaaaagtaagaattaatgtaaacggaagcaaaaatatctcctcaactgctaatgttcaatatataactggaagtagtgaagatgataccaattccttcgataaaccagaaaatgtctcaattaaaactaagaaattaaacaacatatcaaagaactttgattatgatgctgataaatattcagtatctgttataagaattaaactaaaatagtttgattatgaaaagggcactagcctcaaagctagttgcccttttattatatctaaacggcttatattttaattattagtatgtacagttccatcctttgtaacataataaatacctgcagttcctgtaccaccattttttcgcgctgatataacacccaaacgaaccgtatacccgtcagtgttagtaaatacagtagcacctatatctccattagaaaagttagcgtaaccatcaccaccttgaccctctgtaacagaagatattttattatttgaatcttgtccataatttataactgcaattgctgcttgcctaggagtacattcactttgattagttttagtattatcactaactttagtattagcattagtcttagtattatcggtagttttagcagcacttatagctttagatttactgcttccattattgggtaatgcttttctattcgcattactttgtattgatgcagtttgattttgcttcttcgtattattttgtgctacatttacatttgtactagttgctgcatttgcttgcttttcaactggcttattagtttcctcacttacgtttctaacttttttatctgtatctttttttgaaacagctgctttatttatgatttttgtgtttgcttttgtttgatctgttttattgctcgctatgcctaagcttttttcatttgttaagattcctgcacctacaacagccactactaatattcctactattgttcctgctattcttctctttttaaatttagaaatcataattattctcctttttatctccgatttatttaccattgcaacttcccaaggctttacatcaaagtttgaaataattgctatcaaattaataattgttttaccatattctttacgttctctactttttatatagcttaatgctttagcatcgcaagctatttcagaatcttgtttgaactttctaaagaaaaagtacaatattggattaaaccaatggataacattcaatactatgcttatccaatttataataatgtccttatgcttaaaatgtgaaagttcatgaataattacatattttatttcttcttttgttaatttataagcaatgtaatctggtatgagtatacatggcttaataagaccagttatgcatggagtattcacacttttagatttttttatctgtatattacgttttattttcatttccttcttacattcttctaaaaggtcacaaatttcaacttctctatactcaggttcttttctaaccttagaatagaaaatcaaatatacataaatcaaatacagaacaccgattactatcccaacaatccatactaaacttaatatttttaatatatcttgctttttatctttaataaaatcagtattactattaacttttgtgtaactagtagccttatcacttatgatttgtgcattatttgaatttataatacttttagaaacacctctattaatattaacagtattatatatacttactggactacttaaggagtatggcaatatcaatctaattacaacaataaaccaaatataataatgccaaatcggactcattctattttttaaaactaattttataacccatataataaggactcctactgttgccataatagacaacttaagtgtctcaagaaataaagaaaaaattatatgcatgcctatcaattcctctacttcatattttcatctagtattttttttaattctaatatctcgtttttatttagcttttgttttttcaaaaaatttgaaacaaacaagttaacagaaccgtggtatattttatttataaatgattctgtttctaaattcatcatctcatcttctgtgactaatggtgagtacttgtaatgtttcgtatcttttattgtactaacgacacccttttttacaagcctagatataagtgtatgaactgtctttggactccactcacactcctcattaagcccttctacaatttcagaaaaagtagcaggataatgtttccataaggcttgcataacactccattcagcatctgatattttaactggacttttcaaataactccactcctttcacctacaaatgtaatccacatttatagactacacttgtagtcctattttgtcaatacaaaaaataaatatttttcctctaaaggattattatcctaaactaaacttattacttttaatattttataaatatttataaaactggaatgttactatgaaaatttcatgatagatatgattttgcattaaatatgcatacttttttctaaaaaagctaaaatatgatacataaacataacatttataggatggtgattacatgtggttaggcaacaaagctttaagagctggtatttcagcctctctgtgtatgcttgcctcaaagttacttaaactaaaatatcctttttttgctgtccttcctgctgtcattcctctgtcaactaatcttgaagatactataaaatccagcggaaatagattgatggggagtgctataggcgccatagctggtattctactcgcttcatccttttatacttcaaatgctgtgttaaccggaattggtatagtaataatcatatatatctgtagatttattaactgggaaaactctgcttctatagcttgtctgctttttatatctgtaatgtctggaattaagggagatactgttttaacctacagccttcacagactccttgatacctttattggaattgctattgcagccacagtgaataatcttgtgttttcattaactgcttactctagttttagaaaaaacacaaaaattatatacgataaccttttacgaggagttcagtctaaaattttttctaatattgattttgaaatagaagacttatatagcgaaataaataatcttcacggactattaaaaatctacagagatgagattcattttaaaaaaagcaaagattttaaattaaaacaaatgaatctgatttatgaaaatataagacgaggcttgatggagctcaatataatcaattccatggagcaaactagcttacctaacaatgaaaatatgaatagattaaataaagttttaggaacacaaaaaccatataaggaatgtgctgcttcaaagattaataccgtatataattatcaccttgaaaaattaataaaaagtatagaaataatccacaaggagtgcgtctaactatctcttgattgtggattatttaataaatttgtgaatacacccttttgtaattttattttctaagattcttgataatcaattttaaagctatatatgctagtataatggtgccattggtttagctttaaggcaaacatctacaaccttagctacatagtcatcatatcctgactttgccaaaactataataggctgtctttctccttgtatttcaattttatatgcttctgcttcatctctatctaattcattagctctagtaaccttcaatttgcttctatctatattggcaaaactctcaaatatatctataactctattttctaaatcacctgttggacattcaagttcactaattctattaatcgcctcttcaattttattcattgtattatcctcctatagattagttctactcaatattatgtccttttatttttctattaattctataggtaactggactagtaaaaaactactccctatcaaatagttcaattagttcttcctttgatagacttccaagtaatttactattttgaagttccccagttataacattatctattaattcttttttatcctcttgaagtaaaataattttttcttcaatagttcctttagccacaagcttaattacctctactacatttttttgtccaattctatgtgctctatcagtagcctgattttcaaccgcaggattccaccatggatcaaaatgaataactaagtttgctgaagttaaattaagacctgtacctccagccttaagagaaattaaaaacacttttatagcgttattagagttaaagtcatttaccatattaattctatcttgaggttttgtgctcccatctaaatgaaagaatttaattttctcttttcttaaacactcctcaattttataaagtgcagatgtaaattgtgaaaataaaagtacctttccttcatgtcctctaataatttcaagcgctgtcttaagtttcccactccctccattgtagtcctctaaaataagcgaagggtctaaacatatttgtctcaaccttgttaaatatgaaaatatctgaactcttccatctttatgatttttcatcattgctttcacactttttatatattcagcatatactattctctgcgctgatgtcatttcaactatgaacttcttttctattttgtctggcaactccgctactacttcttttttagttcttcttaaaataaatggtgctattagaagcttaagactttctaaattatcttcttctccaaaaacaaacttttcctcgaatttttcacgagaatacaaatatcctggcattaaaaaatcaaatatagaccaaagttctgttaagttattttcaataggagttcccgttaaggcaaaccttgtatatgcctttattctctttataactattgtgtttttagcagaaggattctttatattttgtgcttcatcaataatacaataatcaaagataacatttttgtatttatgtatatccattcttaaagtcccataactagtaagtattatgtcgtactcatccatatcgtaggttctttttggtccatggactattaaaacccttaactcaggtgcaaacctcagtatttcttccttccagttataaatcaaagaagttggacatacaattaaagcttttttacttttttctgataatagaaatgctatagtttgtattgtttttccaagccccatttcatcagctaatattccaccaaagcctaattcacttaaggttttaaaccacttaaaccctttaatttggtattctctaagttttcccttaaatcctttaggtatagctatttctctgttgtttatactggacagtttatcttctattgctttaatatcagcgtaaccatttacagctttaaattctccatcttttatagttttatataaaaataaagcctttccttcttctaattttatatgtccatattcttcattgtcactcattctcaacgcttctagcgtattaaaaaagcctcttatactactatcctcaaaatccaaaaaattgttttctttagttttgtagaacttttttttatttttataagctttaaaggcatgctctagctctttttccgtcatatttcctatactataagaaaaatcataatatccatctctcttataaaaatcgcctttaatagactcaaatttatatacctttaaatcctcaagctcttttcccatggtaaccttacccaatgaacaaatgctgtcttgacttctttttaatatgttaagcagctctttatccttacctgtaaacataaatctatttccatgcttaacaaaactatttctttcaattttcataataagcttttcttcttctttgtaatctcttaagacactattcttcttatttaatatattaatttttatatttccatactttaaaagtacatcacaataaattttatccttttcctcatatacaaaaaactcatactttaacatggtggctgcaaatttttttagttcttcatcaatattaatatcttgagaaatactgcttaagtgcgagactaattttatataattatctatatcttttctatatgcaatctgtttattattctctaatttatgatgtatatcaatgtatttttcaatttgacgctctgaaggcaaataaagctcatctttgaagtagaaaacatcattattcggacttaaagaaattggaagttttttatgagttgttacaactatagagttattcttttcttttagattaaaggttagtggcaaatctttattaaaaattggcactacaaattctatataatcaaacttaaacttaatctttttactttctacttgtttcaaaaactctcttaaatcattaggctcgattatacgattttctcctctaaaaccactttgcaattcatagtacacaaaattcttttcctttttcctaataagcttaaatgcactttcaccaccaggctcctcatgcctctttataattttcttttctggagccttttttcccttagaaacaaggctaagaaatttatagctagtagctactatgtgactgcattttaaggtatatccctttgatttaaattccttgaattcatcacaggagcattccacctctaaacgctttgttaccaagtttatttttatatgagtattaaattctaagggtttaattttgtctttaactctactatatatgtgatatgtatcatctatttttttgcctttaaaataagtaactaaacccatttttaatgcactctttccttcttccttcatagccttagatgcagtttcaagtaatattgcttcaagttcatttaatttcaaccaatcactctcctcttgaatctataaggttttcttagtctcgaaccatattataccataatgtaattcttgtgccataatttagtgttttataaaagcaaaggagaatccaattttcaggattctcctctaatacttaaatcgcatcaaaaaagcttaattgatcactttcaggaagtccttttaaacagccaaactttctaagagaatctatggctgaatttcctatcttagcgcgcttctttaagtcctgtatagaacttataggtttttcctcctgcattgcattatatataccctctgctgcaacatttcccataccagatatactgtttataggtggtctcaagccatcttcctctacaagaaactttgtagcatgagatttatatatatcaataggaagaaaattaaaacctctctcgtacatttctaaaactatttctaaatcgtcatacatatccttatctttaggtccagcctcattgcccatcatttggatttccttcatcttctgctttactttttcttttccaaaaatcataaactctgcatcaaaagcttttgctctgatactaaagtatgctgcatagtaagccttaggtatatgaaccttaaaccaagctattctaaatgccatcattacgtaagctgcagcatgggctttaggaaacatgtattttatctttctacaagaatctatataccattctggcacctcatgctctctcattaaagcttcatattctgcccattttttaggatcctttaaagcttttcccttacgtacaagctccattattttaaatgcagtatttggtggaagtccctttttaataagataaatcattatatcatctctggtacatactgcttcacttaaagtaactattccttggtcaattaaatccttggcatttcctagccacacgtcagtaccatgtgaaagtcctgatatgcatataaggtcagaaaaagtttttggcattgtatccaaaagcattcctcttacaaacttagtaccaaactcaggaataccaaatgtccccactttagagtttatctgctctggtgttactcccagtgcttttgttgatgagaaaagcgacatggtctccttatcatccataggtatttcgtgtgggtttattcctgttatatcctgaagcattcttataaccgtcggatcatcgtgtcctagtatatcaagcttaagtaagttctggtcaattgagtgatagtcaaaatgtgttgttataatatcagaatttggatcatcggcaggatgctgtacagggcagaattcaaaaatctctctcccttttggcacaactataatacctcctggatgctgtccagtagttctttttatacctgtacatccccttgaaattcttattatctcagctttgtttactggaatactcttttcctcgtaatatttcttaacatatccaaaggctgttttctctgctattgtacctatggttcctgctttaaaggtcgttccttttccaaagataacctcagtatatctatgtgcctttgcttgatattctccagagaagtttaagtctatatccggttccttatctccattaaagcctagaaaggtttcaaacggtatatctataccatccttagtcaatggctctccacaaaccggacatgtcttatctggcaagtcaaatccatttttaacgccgtaatccgaaaaatccgagtacttacatttaggacatctataatgtggtggcagcgagtttacctctgttatacctgtcatattcgccacaaaagaggaaccaacagatcctctagaaccaactaaatatccatcttcattggatttccacaccaatttttgagctatgatatacattacagagaatccgttttttataattgattcaagttctttgtctagtctttgctgaacaatttcaggcagtggatcaccatatagctcatgagctttttcataggcaatatccttaattgtctgctcacatccatctatatgtggaggacatttctctggtgagatagggctaatctgttcacacatatctgatatcttatttgtatttgtaacaactacctcataagccttttcccttcctaagtatgaaaactcctgaagcatctcctccgtagttcttaaatatagcggagcctggttatctgcatctttaaagccttgaccagcttcaagtatacgtctataaatttcatcctctggatctatgaagtgtacatcgcctgtcgccactactggtttattaagcttctcacccagctctataatttttctattaatgtcctttatagcttctttgtttggcacctgaccatttcttattaaataatcgtcatttcccaaaggctgtatttctaagtaatcataatctctagcaatgtcctcaacttcttcatctggctttcctagaagtattgcttggaaaagctcaccttcactacaagcacttcctaaaataagtccttctgagtattttttataaagactttttagtatacgtggtcttttataaaagtagtttaaatgagaatatgatactagcttatataaattctttaaaccaacataattctttgctaatattattgcatgataggttctaagcttcttatactcctcttttttagactcttcatctactgaatatatatctacatcctcaagagtcttggctcctctttcttttaatatttcaagcattaccttaaacactttaacagtggtatccacatcgtctaacgccctatgagcaacctctacctttatgccaaggtttttagcaattctccctaatttataactcttatactgaggaaaaacagcttgagctaaagatagtgtatctaagtatgtaaagtcaaactcataacctagcacttttgcattatgttttaaaaatcctatatcaaaagatgcattgtgagcaaccaaaacgcttcccttaataaattcaagcatctttggaaaaaccttatctattgtttccgcattcttaaccatgtcatcagttatatttgtaacctctacaacccttgccggaataggtttttcaggattcacgaataagctaaacttatctattaccttaccattctcatatttcataattcctatttcagtaattttttcagttttaggagaaaagcctgtagtctccaaatctagtacacaataagtggtatcaatactttgatctttagcatttgttacagacggcttcttgtcaggagctaggtacgcttcaactccatatataatcttcatatcaggattatctcttcctaatagtttatgtgcctctggaaatgcctgaacaacaccatggtctgttatagcaatggacttcattccccagctcatagccctcttaattaaatcagtagcactagtcatagcatccatctgactcatttttgtatgcatatgaagctctactctcttctctttcgcattatcctgccttttagctcttctaattccctctgtttctaatataacattggcaatcatctcaacttctcctgagaacttactatagccagcaattcctgaaagcctaacccccttagcctttttaagtctagaaataacctctccgtcttcaccaggctttaggaaagatttacaggtcattgaacttgatccatcgtataaatcaaaagaaactaaggtctttccactttttaattccttggcttctatattagatatttcaccttctatggcaactcttccttcatctggtgttatatcagtaatttttattacattttctttaaatttagcgtttctacccaatattaagcgtggatcttttttacccttcgtttcttcctttgtatcttctcttttatatgtagtttctttaggcgcttttggagcagaactattacttatacctccactaccaatggcctctttaatctgcttcgaaatagcaagcatttcctgatcacgtgcctcttgttgaagcatcaattcctcacttgttatatcatcaacaaaatttatattatatgaagtaccataaagagtttttatagcgtcctgaagatgtttgtcgtacttcatagatttaaagaactccgcagctgcaattttaaagttgaaatttatagtattattctctaccttacattcgctattatttataactgattttagaacagggtgtttatctgacattgaaaatataatgtctttaatttcatcctctataggcttcttgtctgttccatcaacgtaatttacctcaattacagaatcatttaacgcaaatctctttcttataaattcattaagccgttcaaattcctttatttcaatatatttatccgagcttattttcatttccaatctcttgctctttttctttaaaactaccgattctacaacagcactatttatattaccatttaccccatagtcactaaaaatttcatttattttcttcatgctactttctttaaccttccctccaaaatttttagtactttaatactgtcaaaatattaaatgctttactaagctttacaaatacatatcagtttcaccatattattataatagaaatgcttaagctttgtcatgtagaaaaaatatacatacaggcttttagactacagatcaattataaaaaactataccttacaaacttgtatagaaattaacttaagatattcatcactgctaacgctagttagtgtactgagcaaatccacctcatatgcatttccacatacctcgtacccttgctctttgatgttttctattaatctcttatatgaaagatacattgtatcatatgaacccttgtgatacgttgatgcatagattccgtcgggtttttcaaatctactaactatatgtcctataaaatctttaggtatccttattccgaaataagatacatctttataatcctcagattttaaggcttcctttgtaattatactgcaaataggattttgaaaatcaatttgaagttctttggatttgttacaaattgaaataaagctttgcatatatgatttttcatctttaccataacaaggttctatcatataggcttttttatcctcatatgtgaatctaaccttttcaaaatctttaactcccaatacctgcttaagtagtttcgatcgtccctctattttctttcttattctatccaacttttgaatttctaagataactctttcctgctgctttccaagcatttctatacagccttctgcatttctgacacttaaatattcctttaaagtatctatgggaactcctaaatttctaaaggttaaaattgaatctaattcatcagcttgttccaaagtatagtatctataatgtttttcaccacgttttgccggcgagattaatcctaccttatcataataaatcactgtttgctttgttactccaagcatcttagctagctcacctgtagataaatatattttattttccatttttcttcatcctcttgactatatagttacaatatcccttattatatcaaatgtgaaatctatgaacaataatacaagtatggagaatataatgctaaatgttataaagaatataaatcaaagaaaagatatggttataagtatcttcgcgctatcctggccttctatccttgagcagctccttgaaactgctgtacaatatgtaagctctgctatggttggacaattaggtgcagaagcttctgccgcagttggccttacaactacagcaacctggcttataaacagcccttcctttgcaatgggtataggtgttttgtcatatatctccttatctataggagcaaagaaatttagaagagcaaaaatagcggcagttcaatccataataataacccttatacttggaatattcatgggaataggaactttagctattagtccttttttgcctaaatggctgggtgcagctccagagattcaaagaaatgcctcactttattttggcatcatatgtattcctatgatattccgtgttgccattatagtttttggcgctgttattcggtctacaggtgatatgaaaacacctatgaaggttaaccttattatgaatttaatcaatattgttttaaattttatacttatttatggaaaacaaactatatctatagggtcattcaagataactacctatggtggcaatttaggtgtagttggctctgccattgctgctgctacagcctatactgtaagtggtattttaatgtttttagcactttataaaaataaaatagtatcgcctaagggtgaaaagctaaaattaaatattcctattatgcgaaggtgtgttaatgtgggattccctgtaactattgagcgtgtagctacatctttaggacaagtggttttttcttcactagtgacaaggttaggtactttagcttttgctgctcattccattgctataactgctgaacaagccttttatatccctggatatggcatggaggccactgcttcaactcttgccggaaacgccttaggagaaaaaaacgaaaagaaattaaatcaaatatctgtaacaataatcggaatggcaattactataatgaccgtaactggaactattttattcttattccccgattttatgatgtctctatttataaaagatccagttgtcattaaatcaggctcttcggtactgcgccttgtagctatatcggagccagtgtttggagcattaataattttagaaggaatatttaatggtgtaggtgaaacaaaaaccccagttctagtctcaatattatctatgtggggtgtaagaattttatcaacctctatatgcatatatgtatttcatctcggattaaagtcagtatggatttgcatgatagcagataatgtctttcgatttacaatactatttatccgttttttaaatggagcttggaagaaaaaacttaacttataaacaaaagtctacgttctttaaatattataaggtacgtagacttttaattaatccataatttttatatttaaaagctatgttaataaatatagtgtatactaacggaactttcttccaacaactccattattcaatgatttataaatctattttcaaataaaccatatctataagttgtataccatcttcaaaaattggatgatcatagttatctataaaaaagtttttaactctatgtgaaatatgaaatccacagttttcatagaatggaattgttaaatgactatcacccgtgccaacaataatagttttgcatttgtctttataataagcaaatatatattttacaagtgctttaccatatccttttccctgatactttttatatgtagctatattctttaactcatatgttgtactatctttttgcattaccacacagatactttttagatcattatcatataatgcaaacatttctccatagtctaaatatttatcaatcatatcttcttgttcatctgctaatagcaacaagtcaagaaattgttttttgttgctgagaatttttttaactttcataatttcacctcaatttaacacgagttcacttttaaatactacaactgcatttccagaaattttaacctctactggttcctccttatctacccttacctccacttcaattatgccttgcctacctatagcttctccctgcttagctttaaatttaaatatagaattatcatagcaagcaagcttatgatgaacaagatatgcacccaaaggaccatttgcattccctgttacaggatcttcatttatccctattgcaggagcaaacatccttccatgtattaaaatgtcactatcctctgatgtaactgcaaaaacataatatccgttgcatttaataattttacttagcttagaaagtacatcatagttaggttgtaatttgtttaatgtcttcaagctttttatacctatcattaccttagaatgtcctgttgaaacaatttgaattttatagttttctagtaaatcacttttctctatattaagtgctcttaaaagtttttcctttttttctccatcaataacactgccgaactcaatcttaccctgtgtcataataattttataatcatcattttcctttattacatcaacgggtaaaatgcctgctcctgttttatgataaactcttgaagtttctaagttgttctctatagcacgggcataatgagcagctatagttgcatgtccacaaattgggacttcacttgttggcgtaaaaaagcgcacccaagcatcatacctttcatcctttgaagaaaaaataaatgccgtttcagagttattaagctctcttgcaattttttgcatttcatagtctgttaagccatctgcatttgttatcacacccgccggatttcctgtaaacttttcttttgtaaatgaatcgatttgatataaattatatttccttatcataattttcccccccaaagtcctgcctttatatattttatatgtcaattatagttttgctgaaataatcatacaagtaggcactttttagtaacttcctataaaatctaaatatcacactttccaccactacagcttccagagctcgaatcgttaaccttcccttctttgtcaatcttatagagtgcctctagaaacacttcagctggttgtgcacctgatactgcatatttatcatcaaaaacaaaatacggaacagcgtcaattccaagcttagaagcatttttctcgtcttctcttacttcttcattatattgatttgattctaaaatccttaaactttcatctctactaattccaacttcttccgcaagatcagccaacactttataatcagatatatttaaagaatccacaaagtaggccttaaatattttttctgataactcattcatcttgcctttagtttttgcatactgcgataatctgtgagcatcaaaagtatttgttgggattaatttattgaaattatagttaagtccaatagcttcggcctgtaatactatttgatcatttgatgccttagcttgttctactgatatcttatatttcttcgcaataagttcatgaatgttctcactatattccttcttagctgatggatctagctcaaagcttttaaaacttatttcaacatcagttttatattcgaattcatttaacgcaatttctagtctccttttgcccatataacaaaatggacatacaaaatcggaccaaacttctattttcatttttcttcctccttataattgaatacttaataaattatatttttaacttaatttatcactgctatactcattactaattttattttatataaaaaagatatggtatacttatataaaaatggaggaaaacatatgaaattagtttgtattggagatagcttgacctatggctacggagtttctagcacctcctcatgggtagagcttttaaaagcacattttagtataaatgtaataaataaaggcataaacggtgacaccacttcaggtattctttcaagatcctacagcgatattgtaaaggaaaaaccaaattacgtaattataatggcaggaacaaatgatatgcttatggattattccactaagttaattaaagataatattgaattattattaaaagaagccaaggaaaataatataactcccatattagcacttcagccaccagtaatatcccctcttgctaaaacttattgggattctgaaattgactatgaaaaagtagctatcagtttactagattatattcgttgggctaaagcttattgcattaataacaatattgcatttgtaagcttcaatattgtctttattaataaagacaatattgaagctttatacaatgatggaatacacccaaattctgaaggccacaaattaatgtttaatgaattatctaaaattttaaataaaataatttaataggatgagtgagtttatgaaggataatatacaaattgataaatatctaaaaaaggcagaggaagcttttctagacaacaaactagttaagtccttagattactacaataaggtttacgagcttacaaatggtgaagatgtggatactataataaatctcgctttaatatacgattctttaggtaaagtagaaaaagctgaagagtattataaagaagccttaagcatagatgattatgaagagagggcttactatggtctagccacaatatatgatgaaaaagaagattatgaggaagctataaaactatacaataaagccatttatataaatcccaattatcataaggcgtattttttcctagcaaatgcttatgatttatcaggtcaaaaaaatctagcaatagaaacctatgaaaaattacttagtctagatgatatggatttttggtctaatttaaatttaggctgtatatatgaagaacaaaacaaaaatgatcttgcatatagattgttttcaaaagctttaaaaatcaatccgaataatcatctagcactttttaatatgggtgtaatttgttgtaagtttaatatgatagaaaaagctataaacttctatgaaaaatcaatcgaaaagaacaaaagttatgaatacagctatttaaatttggcagttatatataaacatagggatacagaaaaaggtatacaaatactatcttctggaattgaaaattgtgaaaaaacacattttttatattataacagaagctgcttttatgctttaattaacgaaaacaataagtcctgtgaagacataataacagccctaaaattatatccagaattcttgaagtatgttttagaagatgaagaattagaatctgtacgtgaattgaattcttttaaaagctttgcagctaagctcaactaatctcctttccatctacctactcttaaaaagtttgtaacagcaatttaaactactgcatattatggatataacggtaaacttttataatccttagtttgccattaacaatattataagagaggtaaataatgatatccaatgaacaatatgtaagactttcacttgaattaaacttattctttttgagaatcgtgaaggaacataacgttattgctggtgcttcacttcctcctaagtatgctcctactttaatggaaatacttgcagttaataaaaagctagatatgttactttcaaaaacagtagctctatctaaaggaaatatcagcagagaagctatgaattcatctactctaataactccgcttacccttccttctgaaaaagtaactagtgccctaaccggagtacctattaatactgctataacttcgaaggaaataagcctaggttaccgagactattatagaacgggaattaatatggtaacagctgtttctattcttaataaagctatacttccactagtaaactttgttataaactttcaggcaggccttctaagcaagattatgtcctgcaaagcctttagctatacctatccttcaaatatagatcacgtaataagagaagcacgcgcatatgttaatatgcttaacatgcttgaaagaaagcaagagatggacacaactccacaagggattataagacaggaaattttctggaacgatataatggaagatcatgcggagtttatacgcggatatctagatccatctcaaacttctctatttaatactgcaaataactttgttagaaggtttgatgatattgaaaatgctaccgaatctcttaccaataacccttctaaccttaacaatataactaggaacatctattctcttgttaccgaatttagaaatttcaaaagcacagctaccaagggattattagcttgtaaaatcaaagcaataatggctcctcttcttgctgaccatgtaactagagaagcaaattactatttaagacttcttcgcagctttacttcttagcctacacaaagctcatttatgaattttatatacataaatgagctttaaatactatcatcacaattctaaggatacctgatttattcttttttatagacttaggaaattttatagttcaaactttttaaagtgctttttaaaagttattgaaaaagtttgtatgcaatgatataatttaacatgtaaataattacaaaacactagaggggttgattatgataggaagttttaaaattaaaatgagggaaaaaataggctatgcatctggagatttagcaagtaacttgatatatcaaaccatttcaatttatttgctatttttctatactaacgttttcggcttatctgctggtcaggccggtgtaatgtttcttgtggtaagatttatcgacgcaattaatgacccaattattggaactttagtcgacaaaaccaatacgcgttttggaagatttagaccatacttattatatggagctgctccttttgcagttttagcttttctgtgttttaccactcctaatttttcagcaacaggtaaattaatttacgcttatgttacttacgtaggcctttcaattacttatacttgtataaatgttccttatggtgcattgacatcagctattacagatgataatcaggaaattgttagcttgacctcagtaagaatgttttttgctaatctaggcggtgtaatcgtttcctactttgttcctgtactttcggcatatttcacaaaatcatttggtctttcaggtggttggcaaataactatgagtattctaggtatagcaggtgccttcctattgctattttgtttttcaagtactaaggaaagagtaaaaagcgttaaccaagatcataagattaaattctctgatctctttgaacaattcaaaactaatagacctcttattgtattaagtattttctttgtactgatatttggaataaattcaattaatagttcaataggcatatattacattacctataacgttggtcgtgctgacttagtacaatggtatacggtattagggtctctccctgcatttgtttgtataccactaataccaaaaatcaacagaaaaattggaaaaaagcctttattaattagttctcttttaataacagtgcttggtaccttatctctgttagtaattccaactcatgcagtagcattaatattagtttctcgtgtgattacatcaataggttcattgactgccggagcatttatgtggtcattaattccagaaacaattgaatatggtgaatacacaacaggaaaacgtttaagcggcttaatttatgctattatcggattctttttcaagtgcggaatggcattaggcggagctgtaccaggaataatactcggtaactttgggtatgtagccaataaaacccaaactcctcatgccctaacgggtatacttctaactgccacagtcgttcctgccgtactcatgatattagctttaatagatattaccttctacaacttagatgataaaaaatataatcatattatagctactttaaaagaaagagctaaattaaatagaggggagaatttaaatttatgattaaaaatccaattttaagaggcttcaatcctgatccaagcatctgtcgtgctgacaccgattattacattgctacttcaacctttgaatggtttcctggagttcaaatacatcattctaaggatcttgttaactggcatcttgtagcacatcctttaaacagaacttcacttttagatatgaagggtaatcctaattcaggtgggatatgggctcctgatttaagttatcatgacggaaaattttggctcatatacacagatgtaaaagtaactgatggaatgtggaaggactgtcacaactatttaactacctgtgaaagtgttgatggtgtatggagcgatccaataacattgaatggttctggttttgacgcctctttattccatgataatgatggaaagaagtaccttgtaaatatgtattgggatcagagaacttacaatcataatttttatggaattgttcttcaagagtattctgataaagaaaagaaactaatcggtaaagctaaaattatatataagggcactgatattaagtacacagaaggccctcatatttatcatattggagattactattatctatttactgctgaaggtggcacaacctatgaacattcagaaacagttgcacgttctaaaaatatagatggtccttacgagatagaccctgagtatcctcttttaacttcatggcatgatccacgaaactcattgcaaaaatgcggtcatgcatctcttgtccatactcatactgatgaatggtacttagcccatttagtaggaagacctctacctgttggaaatcaaccagtacttgaacaaagaggctactgtccacttggtcgcgagacttctatacaaagaattgaatgggtagataattggccaagagtcgttggtggtaaacaggggtctgttaatgttgaagcacctaaaattccagaagtaaagtgggagaaaacctacgatgaaaaagataatttcgacagcgacaaattaaatattaactttcaatccttacgtattcctcttacagaaaatatagcatctttaaaagccaaaaaaggaaatttgaggttatatggtaaagaatctttaacgtcaacctttactcaagcatttatagcaagaagatggcaatcatttaaatttgatgcatcaacaagtgtgtcatttagtcctgatacttttcagcaagcagctggattaacctgctattataatacggaaaattggtctactatacaggttacctggaatgaagataaagggcgtgtaattgatattgtttgttgtgataattttcactttgatatgcctttaaaaagcaatgttattccaattcctaaagatgtggagtatattcacttgaaagttgaagtaagagttgaaacatatcagtactcttattctttcgatgggataaactggtcaaaagttcctgctatttttgaatcgagaaagttatccgatgactatgtacaaggtggcggctttttcacaggagcttttgtaggaattaactgcattgatataactggaaataataaacctgctgactttgattatttttgctataaagaattatagataaaactccttaaaccgtaaaaataccatactgaaaattaattcagcatggtattttattaaaattattgtttttttacctctctacatcaagatctacttcttttaagtcaactacctttgtcttgtgtttaatcttatatccaatccataacgcaataaatattggcagtcctatataagacgttattactcctgtccaatcgattttatcagcttggaaataagtaattccttgacctaaaataacaactacacataaagctaatgctattactggtcctataggaaataactttgccctataaataagcttatttaaatcacgtttctgagcaacatatgccttacgaaatctataatggcatacagctatacctgcccaagcaaggaagcctgcaagtcctgaagccgcaacaagccaaacataaacagtactctcagcgtaaagtccagttaagaaacatgctgatgctacgatagtagttaatgctaatgcatatactggaacacctcttgaattaagtttccctaagattttaggtgcctttccttctttagccattgcataaagcattctacttgaggcatacatacctgaatttccacaggatagcactgaagttaaaattactgcattcattattgctgctgcaattggtatacccgctctttcaaataccattgtaaatggacttatcttaactcctgcttgtgtataaggaattatcgcacttacaacaaatatagttcctaaatagaaaattaaaattctccagaatatcgtattaattgctttaggtatggactttttaggattttcactttctccagccgcaataccaacaagctccgttccctgaaacgagaagcctgcaattagaaataccataaaaatagattttacgcctccaacaaacggagcatctttaatggtaaagtttctaagtcctatcttatgtccacctattatacctaaaattgtagcagtacctactattaagaatacaattacagtaattaccttaattcctgcaaaccagtattcagattctccgtacgcttttacagataacaagttaagcgcaactattaatacaaggaataaaatgctccagataacagcaggaacacctttaaaccaaaacttcatagccattccaccagccaccatttcagctgcaacagtaatagcccagttgtaccaataattccaaccaagtgcaaaacctacggattcatcaacgaacttcgaggcataggtttcaaatgaacctgaaactggcataaaagtagccatttctcctaaccctgtcattaaaaaatataccataactcctatacatgcgtatgcaacaagtgcaccaccaggacctgcctgatgaattgtatcaccaagtgctataaatattcctgttcctatggctccacccatagcaatcatattaagatgccttgctttaaggcttcttttaacctcatttgaatttgtttcttttatagtatctattttttcttcctccttatcggttatatttccgataagcgaactaactaagtgagataaaaaatcagattggcagcaccgtttgccttttcacgtactagcaaattaaaggcaagctaaagcataaaatctaaatgtaattattcgcattttatactttactataaattaaaaaacgccctgagactacactcagggcattaaaacacatatttaataaaacaaatatacgttgttaattccacaccaatgatagttctccacaattatactttgtgacagttttgcacatattttatacaaacccagcagtacagcattaaagcattagctatacgcttcggcaaaatttccttttaaactgcttcatagtgcttgtctccacagttctactcttaaattttgcgcctctacctcagttattcacttatttttttagtatacactatactttaaattaagtcaaattctccaaataacgctgatataatagcctcatagtcacgtagtctgtttgcctttcgtattttcttggcaaatttatcgctatccttaaataaatgtatcatataaaaccagatttccttcattttaaatagcacatttttttcaccagagagaatatcttgatactcttcataaattgcatcatgaaatttctttaatacctctttctctaggacattattgctattaattttcttaattatattaggatttgaaataattcctcgccctaacataactacacctaaattcgaaaattcttctatgagcttaatatagtcattactttgaaaaatatctccattgtaacacactgtacttttacttaactctaaggcatccttaaacaccttcatattaggtttattattataaaaatctgtttgtattcttggatgtatgataagttcttccaatggatatttattaaatattttaattagttcataaaattcatccggagaatcttttccaattcttgtttttatagaaatcttagcaggtgactttgaaaatatcttctctaaaaattcatctagctcctgcctttttttaagaaatccggcacctctaccttttgatacaactgtaccagatgggcagcccaaattcagattaacttcactataacctaaattcattaatttctctgtagtgaaaataaatttattcgcgtcattagtgagtatttgaggtactaaaaaggttaccttgttattttccggaagtacatcctttagttctcttgaagttaagcttttactacttgtaggtacaataaatggtgtaaagtatttatcaattccaccaaaaaacttctcatatgcattcctatatatgtacccagtaatgccttctagtggtgcaaaatagtatttcatataataaactctcctcatactgatttttaagcaaattcaaatatagttgttttttaagttcggtatccataattatctcctctggtagccgtatagaataagtataacataagtatatgaaacgctaaataaacctatattcttctctaaatttgttcataaaaatctagaaatacgcacctcctatatacttataagcaaaataaatattatacgtaaaaaaatcaggtgctaccttcttacagtaattacacctggccttttaaacataaatttataaacttaggatactagttttacatttactattttcgtaccacacacactgaccacaaatatccttcattactccttcgtttatatttaaccttaacttatttacgagttcattatatgtatatatcttttgttttaatttcaacacacgaattactttattatctattgccattactttttcgttgcagccacagttattgtccgatattttattaggacaacttccgcatacatcatccgtagaaaaaacgattttaattttaagattatctttttccttaagatccctatatatattgtccatattatcaataaagtcttgactatatccttttccttcataaccttgaaagcacattatatgatgtggtctcaattttatcatgctagtccccccgatattattctgcttcgtatattaatacctattatagaaacaattataatcttaagcatatcaaacaaaataaatggtaaaactgcagtcttaattgccaaagcaaaggatatttttgttaccaaaacaagccatagagctccaaaaacatagcaaactacgcttgccaaaaccattgatattatgatataggcttttgttctacatttatctgcaacgcatccaacaataagagccataaacggaaatgcaatgataaatcctcctgcaggacctaaaatagcaccaacgcctcccgtaaagttagcaaaaacaggtgcgcctattgcccctaacacaacatataccagctgagatataaaaccttttttagcacccagtataattcccgctaaataaacagccataacctgcattgtaaaaggcactggactaaatggaagctgaatagatatttgtgctaaaacgcagcttattgcagcaaatagagcgcataatactaaatccttagttgatattttcatagttatcccccttattgtaaaccatatttatagtttaggtttacaatataattatatacttattgctttcactgtcaatatttctgacaaacaaaaaagtctctgctttacatagctattatgctttttatatgttaacagaaacttatttttgttatttagtttttagagacctcttttatatactgccaggttactccattatcgcttgattggtacaacgccttacttctatctccatctgaaccttgacccactaaaacctcaagctttccgtcttttttatatggcattgctggcaaatcaaatctactatttgtctttatatcagggaaacttacttttgtgtatgatactccgccatcggctgtgcgatataagtctccattgcctcctccattatatgctaagcataaaaatccaagcttatcatttaaaaaggttataccatcggctgttccaacagctccattaaatggatcatcatttatggttttccaattagctccatcagtagttttatttaaagaatacgatctattacctagggctgccgcagttacctccaggcgatatccaactttctttgataaataaaactcgccccaagaattcctagactgttcaaatttctctttattattagaatctgaagttttgatatttcctataccatctactaaattatatctcacaggagtatatatattttcttttccaggcacaaatacagaaacaatataccctatttcttcagaaaagtcatttccctttggagtaagctttccttttgaactaatattaacaataccctctgcattatatccaaagcttcttttaccataataaagaataccatacttcttttcgttccatttgctaactgtcttcttaagatgaattaccttcatagtcttaattagtggttcgaaaagcttgtctttactataattggcatctacatgtccatttaagtatataactatatcacttgactttttcatgtcataactaatcaaataactttcgagcttgtctttatcattttttccataaagatatgtatcaaacgctgttattctcccattagcgtcaaacttaagactaaaactgctttgaacatataattttttgggcatacacacctttttatcaatatcctgaaaaataccatctatgccatattggtatatattattatgttcaaacgatacagtcctcttgttttttaaatcttgcaaaaaccaagccaactttccattataatttatagcactatgatatatttttgctccataaaagcaggttattacagccaaagctatagctactaaacagataaacttattttttaaacgccagtaaaactcatatatatcctctatcttctccaaggaaagtttccttttccttatgattctaattatccaaattataaaccagactaaaaagaatatcatcgagacaaataataccttaatatttttattgtctcttccactcttgcacaaagtatataattcataaaacgagatccaatacactaagacgaacatcgtacaacttaaaatcgataaaattaattctatttttgtagtttgcttatattttttcactttcattccaccttattcattatagaaagtatagtagtaataccctacacctaattaaattatataacaaaattcaagtaaaattttaagaaaagtataaaacttatttattcaagttcgataatatagttagataaaaaaaaattgcataaaaaaaagaggaagaacgcctattattatgagacttctccttcatacatatattcaataaataaaatatcattatttctaaaattattcgcacgtttataacggactcagtaaaattccaaagtccttcaatgcttaatctatttataatttattttaggccacaattacttattatcattgccagagaatatcttcgataagaatcctgattttcccttctccatttcttgttctaaagaataagcttgtgccattatagtttggtattttttaacttcattaattatgttttcttctctttctacatacatttcacttaatttttcaaactctgctttcatactaccttctgctgaaagcttttcagttaatatctgatctatctttgaatataattcatcacctaatgaattattgttatcttcaccaagcttagtgttgatttctcccaatatatcttctttaagttctttaatttgtttctgctgttcttctttaatagctcctacaatttccttacaaagcacttcattattttctttaattttattatctaagtactcttttagactatcaaattgttcattttgagcttttgaaactgtttcagagatctcatcaaaagatattgaagaagcccccgtagatgttgctactttctcactatcaaaagatacaccttcacaatacttttcaatttctttaatagtcaatcctttattttttaagttaattaagaattcaagcttgtctatatctttatctgtgtatgttagttctttatctgatatttttatatttaaaataccatcaaaaacattagtaaaatataatatagtaccttcttcttgttctaataaagtggctacctgactaattgtgtaatataatatttcaccacgttttctaccgcttactacatccacctcttcaacttccatagtattctcttcagagttcataatgttttaaatcccctttctcatcttttaaattaaatacgatataagataaattcttcatcaaaaacacggttgaattaatacctcactcattacattataatataacttatgataaaaatacattattttttacaattttaattcaaaaatttataattttactttaaaaacttttaaatatagtgtaaaattatgttattgtattataatttatcatgaatatgagttcattaatataatttgactttaattgatagcgaacctagtatgaaattatgttattataatataatttgtcaaaagatacattaatttctacataacgtcttgatgattaatgattttacaatgatattttaaatttaatcaacaagagtttaagaaattaaattcttaagtataaataattaagtataagaaaaatggaggattagatcaattatggaaaaaagcaaaatgctattagttggattaggacaaggcgcaggaaatgttgtagatggtttattgagcaaaaatagctcttacaatggtttattttttaatagtagttcattagacattagaccattaaagaatgcaaacataggtaaaaacgtttatctatatccaggtactgacggctcaggaagagacagaaccaaatcaaaagaaatgataaaagataatgcaaacgcaataggaactttactaaagaaatatcctcaaacagaagttatggttatttttgcaagctttggaggcggaacaggttctggagcaataaaaacatttattcaaatagctgcttctgctataccaactacaaaaataaatgttgttggtatcttaccaagcttatcagaagatcagttagcatttaaaaatgctttagagtgctggaatgatatcaatagtgtaatgcatttaattaacgatattaaatttgtagataacaataagagaaatacatacacagaaataaataacgaagtagttgagagcttagacttagcatataacctaatgggtgtccatgctgacggaaacattgacaaaaaagactcattcagaataaatactgctgatggagctggtgtagttttaaaactttatgatggattaaaagacgctaaaaccgctatagattttgctataaagaacagtgtattttctcaaccagatacatacgattgtgactatttaggaataaatttaaaaatagatggttatgatgcaaatgaaatcggtaaatcctttgaggtttacagaagtacttatgtaacttataataattcattcaacgtaattgttcttggaggatgtgagactcctactgaatcaattaaattaataaaattagcactagatgataaatctaaaagaaaacagtcaagagataaagcaagaagtgtaatcatagattttgacgacgaaggttctaataacgaaaataattccgatgacacattagaattttcttttgagtagttagatactattatctgaaatgcaagtgcgcagttacttacaaaaatgattttacattccatttttgagtatatattttgaaaatatgcatgtcaagaaacctttatgtacaggtgctttttggcatgctaaattttttataactctaattttgtaattactcaaataaatgtgttgtaatataacttttgtttaatctaacgcaccctagtccataagatctttatgcgaaatgtttatatgtggattagaatctatttttatgtcaaatttacctttagaattatctccaacaattctaacaatatattctcctcttctatgtgtagttaaatgaaaagttgactttttcactgatttatgaatagccatacttttatatctagaatctaaaactactatatacaattttcctttagtgattttagaactatcatgtatagttatttttgtccccttacttgcattaaaatgaattagtgaccatctaccattaaatccagcaaagtcaaagcttttaccatcatctgtattcttttcgttctgtaaatatttaaagctaggcatatccttcctttctgtcaaatactcacttgaatctgaactattaaaataacttttatatatttgaaatacaccaaaaaatactataactattattgcgcttattaaagagcctttaattattgctgttcttcttctcatcgatttactatcccccaattaatgcttttaggtatttggtaatatctcttaagtaccatatatctaaattttactatcaatataagactttatttactaattataacattaaatggtgaaaagttaaaagctactttattcaaaataagtattatgtctcagtttatagcattcgtgcatccatatttacatagtctattgaatacatctcaaaaaacaaaattcccgaactaaaagttcaggaattttaaatcatattttatactgctttatatttttcaataatttcattttgtttttttctgtagttctctattctttcaagttcttcctctctatctaaatttgttatttgtgatatgtttttatctgctaatattctctttcttttagcatcgtaagccttcttaacttctttaaagtcctttttattgcttatatttaattcgcttaactcctcttttgcttgattatatgcttccctttgtgattttaacgtattggcataagaatttacatagaaggtatcactaacaaagcccatcatatatccgtatctgtttactatatttaatttttccttagcttcctctagctttcttccttcttcctccaagtcaatcatttgctgctttaaatctagtactttttgaacttctactattctattttcaatagtatgtaacttacttatgtctttaaattcctcaactatagctttgtccatatttgccatagctttttcagtaatttctcttatttgattttcctttaatgaattgtatttccttgaatatctttcttgatctattgggttatacatctttgatacaaaaacaaacttctctttcatatagtttatcttatcatcaatttcactcttacctagaactccaagtgaaccaatctctttatctaatatctttatatcttcatctatttttttcactttttcttcacaaaaagctttcatatcttcgcttatagtgttcttactaatagatttaagttcatctttagctttaaggctgcacagaagttcctttttcaattgttctaaagtcttcttttgaggcttattcttttgtgtattatttttagattgtccattttttactgacttgtttttattgtttttgttttccttaacttgctttcccttatttttattatctgctggttttactgttttgttatcctcttgcttgttatttacattttcttttggtaaactttcttcttttacgatatccttattttcttttaattcattttccttatttatgccgttttcgtccttctttaataattctttttcatttatagtattttgtattttctttgatgagtcctctttaacttcatcggcaaaataagtttccatattaacattcaatatatcactgttctgcttaatgatatcgtctcttttagctttgtacttaattatcttgctattctctttttcagcatctaagcttgctatatctgatatattttcagcttctataagctcttgttctttatcatcgaatataattttagctttatcgtagtcatccaaattacttatattcattgattttaattcatcctcagcttggttgtactcttttatttctttttcatattttttctcataagaatttttgaaaagttcattatctttatgtttatttctagtaaccattataggtttatatttttcaagtatatcaagcttctccttagcattttctaaaagctgagcttcctttttcaattcaactaaatccttttttagttttaaatttctttgaatctgatccattctgctttctatgttatacaattcacttatagcatttaaatcactatccatatttgaattgacatcttccatagcacttttagcgattttctttatttcattttctttattcatatcatttaatggatgatttggtttaagatatctttcttcatccttaagcttttgtattaaatattctatattatcgtctacgccttcttcaataatgctaattgcattaatttccttatttaatctttttatattctcatttattacttttgttttttccttgtaaaaataacgcgtaattttatctttatcacatgcgataatactcttcaattcgtccttagccttaaggttacaaatgaattccttttttatcttttctaattttcttgtaccaatatccttatacttttgatatgcactataagaatctgaaatttgattgctatctaaactaatatcatttttaatttgatcaagtttttttatttcgttttcaatagttttaattctttcttctagctcagcttcttctttaatatctgttgtgtttaaaactttctctttgattttttcatacttacctatgttgtccaaatttttatttagtacatcttcatcaaatccggacaattcatattctttatatatgctatcaagagcctgaaacgctttattagcttcctctaaacttgatctttcttgattaagtctaattaattcatcagttatttttgcaattttactttgcaatttcttaattgttccagtaaaatcctcctcgcttggaaaccttccataaatcttacataattcttgtacctttttatattccactgcatttacgccttttatttttggaatctgtttgtcgttagcctgttcactcgctgctccatcactagagtagtagccatccaaacttccttcgtaatctacttcaatatagataccaagtaatctttcattaacaatttttaatctaacgtttacagcctcaccatttatactatgttttaacagcagaggatactgcaaattttcttctagattaaccttacttttttcatccattatctctactaaatttgagttttttatctcctctattgtcatcaatggtttaattaaatattttttatttaatgccaattccactgtatctatattcgtttttgtctccactttatcatctccttttttatcccataactaatgggttgtaatgttaacttttataaaagtcatcattacaactacttatatttgaaaatcatcttacaaatataagtgccctaagattattttactatttgttattttatttgacaattattttattacaattaattctatatttcatgtttttattctataaaattcatataaacacctacattatcattaaattacatttattcaataatgtaatttggtattaatatcataatttatttaatttcattatatatacatttataaatttaaatcccatatataataaaagctctcatctaaatacctccaatatctttatacctaatataaaatatttaccagtcataatatttcatatattaagtacatagataatataatcttcatatagaaatatttaaaaacctgaaagtacattaacattagggagagcgatattatggaaaaagaattattaaatcaagttgccattgtaacaggaggtaactctggtataggaaaagctattagctgtgagttagctctaagaggggctacagttgcaatccttgctaggaataaaaacagaaatgaagaaactcagaaggaaatcatagccaaaggtggacaagctgaatgctacagcgttgatgtatctgatactaaggcagttaatgatgctgttaatcaaatttactctaaatacaaacaaattgatatattagtttctaatgcgggaaatgctacccctttggaatacgctaccaaaatgtctgtagaaaattttcagtcagtcctcaaaacacatttattgggagcctttaattgtgtaaaggcatgtggagaaaatatgagaaaaagaaaatatggtagaatcgtaataatatcatcagtagcaggttatcatggatttgcaggtcaaatgaattatgccgttgcaaagcatggtttagttggcatgggctattctttagcaaaagaatttgatggctcaggcgttactgtcaatgtaatacaacctggaattattcctacgccaatgtgtgaaggtgttatcgaggttgccaaagaagagctttcacctgaaagaataggaaagccagaagatatagcctacgccacggcatttttctgtagtccaagagcaggctttatgaatggaactccactagtaattgatggaggcttagttttagaaacaagtgttgatagagcagtaaaacagctgcttaaaaacaattctctataaagattatcttacaaaacagcaaaaagaaactaccaaaacttactacttcctgttctggcagtttctcttttatagctcaatcaattcatactctctacttccaagtcctatacttgcagcatactctagtgtatttcttccccttttaaaaacagttctgccctcatttttatcaagaatatcaagacaagcctgatcaatagctacaggatccgtagatgcaaaaatacctatgtccttagcaatatgtttcattggatgtccttcacaatcgcaatttttagttatgttaaatgcaaagcttatgtatatgttatttttacctttggccgctgcatatgcatactcagctagtctttcgttgaatgattttgtaagtgaagcaaaccaactgttcgttattgcgctaaattgacatgttgccatacatgaagcacaaccaacacatttgtttttatcaattttagccttcttatcaacagttatagctgattgtggacacttattagcacaagctttgcatgctctgcattttagtctatttatcttaggtatactatttgcatgctgtgctagctttcctccctttgatgcacagcccatgctaagctgttttatagctcctccaaagcctgcaagtacatgtcctttaaaatgacttaacacaattatttgtttctctttagctatctccttggcaatcttacaataatcgaaattctttttatttatctcaataagttcgtaattttcaccaacctcaccatcagctattataacaggaactttagtaaagccatgttcttcagcaaccttaagagatgattatctattgaattcctctgacctttgtatagtacattagtctcaataaatgccgtattaattcctttttcttttaagtaatctattattccatcaaaattcttaggtgcaatgaaagtattattacctttttcccctaagtgaacctttaatggtataaacttttctagttttaccgtttctcttttctcaatagtaaaaagtaatttaacagccgcttcgtttatctctttagttttagaataagaatcaatagctttaaagtaaactttaggcaaaataattccacctccataacattcttcaacttataaaaatgatagcattcacaatctcacttatcaataagttatttgttatttatggtaaactttatatatgaaactagttagtacacctttagtcaatgataaatctatttagtgtgtcctccatggaaatcactctagcaaaacgtttattccaaatcttataattgtaaaatttatagagcttttctccagataaatactcgttatcaaaggtagtatttgtatccttcggaataattaccttgtattcattgtcaaaagcacttttcagtgtagcatcaatacaatattctgtttgaagccccactaatataatggtatcagtattcttactttccaaatactcttttaggtctgttctatgaaaggcactattatactttttttctataatgaactccccacttttaggctcaagctcactataaatttgccatccctctgtacctttctcaagctctgttccttctccatcatcgtgtcgtacatatacaacctctttattgttagcccttgccattataataagttttttaatgttttcaattacattcttatgattataaggcttcttcttgattaatccattctgcgcatcaacaaccatcaaaacaacattattcatatgctttcttcccctctttataaatctataataattagattataaagcaggtttttctatttgtataacgaatatattcaatagtatttatcgaaaataggaattatacgaggagcgatctatatcatggactatgagcttttaaaaacctttatttgtctagctaaactaaaaaactttactaaaacagcagagcagcttcatgtggttcaatccactataaccagcagaataaaacatctagaacatactattggggaaacactttttattcgtacaaataagaaagtactgcttacaggtgctggtgaaatttttcttccttacgctaaacaattattgagcatacaggaaaccgctatttctcgtcttcacactttagaattattcaaggacacactaaatataggtgctgttcattccatttacgattgccacgtacaaaacatgattcttaaatacatgcagagaaacaaaaaaattgcaataaaaataactattgaacacagcgaggaacttatacaaatgcttcacgataatcaactagatgttacctttacatatttggatattaaatcttctcaatttatatgcaatcctttctataccgataaaattatattagttacaggatcccaaaataattataatgaacgtggcattacaaatgatgaacttagaagtctgcctttattatcctctgcaattttgacagaagaatttcaggaatggttttactcaatttttccaaggaactatatttacccattagatatcaatataaacagtaatatcgttacattcttaaaagatggaattggctttagttttatgccagaatctgctgctaaaaattttattgaagaagggtctctaatagaggtaaagcttcttgagagtacaccaccaagtatgaaaagctatgttttactaaacaagcaacgaattaattcagaagcagtacattcctggttaaatgaatttcctactctaacaagcacataatatgatttaaatgaggttaattaggaatactaatatgtattattaatatttacaaggaaggtgactattgtggaaaagattatacctcatttatggtatgacaaagaagctaaagaagctgctgaattttacataagtttatttgaaaattcaaagcttttaaacactgcagttttagataatactccttcaggtgatgctgaaacggttaattttattctggctggcttaccttttgcagccataagtgcaggtccattttttaagtttaatccctctatctctttatcagtagcttgtagttctagacctgaagtcaaaagactttggaacgctttttcagaaggtggcaccgtattaatgcccttagacaactatcctttcagcgctttatatggctgggttcaagaccgctatggactatcctggcagctaattttacatgactttgctccaataactcaaaaaataacaccaagcttattattctccggtagtgttacaggaaaagctgaagaagctatggaattttatacgagtatattcgagaactcagaaataacctttattaatagatatgctgaaggtgaagcaaaagctaaaaatgcaaaaattaactttgcctcctttaaacttaacaatacaaatttttctgctagtgataatggatttgatacaaactactgttttaatgaagccttttctttaataatcaattgcaaaaaccaaagcgaaatagactactactcagaaaaactttcccatgttccagaagccgagcaatgcggttgggttaaggataaatacggcatctcctggcaaatcatcccacgcagtatgaatgaaatactatccagcggtactaaggaggaaattaaaagagtcacagatgcttttttaaaaatgaaaaagtttgatatagatgctttagagaaagcaaaacgtggctattaataagctaaatgcagttctttttaactatgtagttactgtataaatagctaataaaagtagactcaactactgtgaacctcctgtcaataaggcatccaggaggttcaacttatttttatatacgttagccgtcatataaaatcaacgcaaaataaaaacagccagtaagggggaacaaactgactgcctgtatattaagttaatctatcaactactatatttatatattaatacattattgtgacaattaagttacaacaatgtgtacatactgtgttaatttgttacttttcttttaaattcaaagatctcttttaaaattaaagttatcttcattattcgttatactataaataacttcatcaacggctccaccaatccttaagctatcactatcattaatccattgttccttaatagctatgtacctacaagtgctttctttgctttttaaataattatatattatatgaacctcatctatttcattcttacctacattaactatattattcaaatcgccacataaatgcagcataattttaagcttaattttatgctttatttccttaacgctaaaatcgctaagtttgtacttttcacaaaagagcagtttgttatatcttaataaaaagcacttaatttcctcattgtttaaaagctctacaagaactatattcttattttcctctatgaaattaataatctttgcagtgctagttaaataatttattgactttataaagtctctgtatttagctgcattttcaaaatcaaaattgttagaggcaatattcattttcttttccatttcccctacaatagtaatatcctttccactaagcagctcaattattttttctattaagctagaatagtactcaaaagaaggattcgctgtacacataccaaggcataaccccgtagaatacttcaaacaacctgaagccttttttgaactattagtgcacaaaattttcatgtgttcctttataccatataaagccttttccacagtacttttactagtatatggaccaaagtataaactttcaccaactctttcatcattacttttaatttcaacgcttggatatttctcatccagctttattttgatatagcaataacctttaggacttttcatttgcctattatatattggttttatccttttaatcaatttacattcaagaagtaaggcctcaaattccgtgtctgttactatataatcaaaatccttaagatttttaactagtttcaatacctttgaagaatgtgatttagaatttacaaagtacgattgaactctactccttaagttcttagattttcctacatatatgatggtattcaatgaatctttcattaaatacacccctggtgcagaaggcagttttcttattttttcttttatctccaaggttatgtcctcctaaagacatttattgtctacattttatcatacaattacttctctctacacaatataatataggcattggctccataatccaccttattgccataatataaaaacaagaaatccacttataataaatggatttcttgcttcattatttaacgtgctatagtttaagctccctttgctattttcttcattaacgccataagatcagctccgctaactcttccgtcattattcatatctgcactagtcttgtttattgttacagcttttccagcaagatagcttctaattaatgtaatatcaagagaatcaacgactccattaccatctacatcacctaaaagagctgcacttgaatctttattaacctctacggttgttgtaagtgtttttgtagaattccctactgttactgttgtcgtaattgttgctgtgccaactccagttgcagttatttttccatcttgagacacctgtgcaattttatcatcactactcttatagctaactgtacacgttgaaagtccattatctactatcttctgtaagtctgtaggtaatgttaccgaaagagaagacgcattttttgtcacactatcaaaatatacgtttgcttcattaatagttgcagcacttaccttttgttctaacttctgtgcatatactttgtaaacttttgttactgttaggttagtcccttggtctccgatataaatagtctggattcctggtaaaacttgaccataagtatcgtaatttgcaagagcatttttatatgcacttactatatctttaagagtataatacgctatactttgagttccgcttgatttagttattgctggatttactgttacccagtttgtaccagttaagttcccttgtaaaattaattgaggtgttttatcacttgtgtactctacagctattgctaagttgtttgagaaatcatcgtcaacaaaatctaagccatagttaaatgaaactgcttgtccccaatttttagatgttgctgtaccactaaacaatgaattttcatcataattagaattatctttcggattattccaaccatctagcattgcttgtactatttctggatatacgaactgaagagtttttctattaaaaatacccattgaatcagttgagttaggagaaaaagcattattatcccaccaacagcatggtattccgtaactacttgctacctgtaaataatattttgcaaaattaactctatcttgtaaattatttttatctgtagctgcaaactcacctacaacaactggaattcccttttttatgaaggtcttatctaacaatctaaaagttttatcaatacatgctttatcagcatcaccaaaggtagaataggatcctttagttgtatctgtattcatagcaaagttatatggtatatatgcatgaatagatactgcaacattaggatcatttggcactaccatagctgcaaccttagcataatcagctgatgcacagtaagtaggcatcattacaagtctctttccgttatttccaccagttgcacgtattactgataatgtctttgcattatattcatttacaacattataatatgatgaattacctgtccaatcgtcgcccgttcttggctcatttattgtttcaaaaattaattggtcgccataatctttaaagtgatctccaacctgtttccatatagcgcttccttcattaataacgctgtccttgttttctgcattcatttcaccttgtattttattgtggtgaatatttataattgcatacataccattagcaagcgcataatttacaactgtttcaacacgtgacatataagctggatcaatagtatagttagaatcagtatagtgctcatcccatcttacaggaatacgaactgtattaaatccagctttcttcatctgatcaatcattttccttgttgttgctggatttccccagccagtttctccaccggcagattctaaactatttcctaaatcccaaccaaccttcatatcttttactaaatccatagaagaaagacctctcattgttgttgggtaatgataatctgatggaaattctggtgttggtggtgcagctttagtatactgataatctgataaagtaatatcagctgtaacacctgtaatcttgtgcaaataattggctttctctgttgcatcctttggtaaatagtcgtttaacaaaacttgagtagtatttcctgtaagtccccaagaagattttgttgcagtatacgcttctgaataatccttatctaagttaattacaagatcatcataaccatctgctttaactgtaaccgtaccaacatggaattttaatgtacttgaatccccctctgcaaggtttccgtccgaaatgtttataccaaagttggcagtagaatttgactttgcaaatgcattcttagtagaatcaacaccttttagatttgttacatcttgatatactaaagtagccgtatcccctatatccatccatgtccaatcatcagtgttttgtgtaaaggcactagcataaatttttgttaattgcccttttgttgtatatattgattgtcctcctgttgctggtgctggtgttgctttagtatattggtaatccgataaagtgatatcagctttaacacttgtaatcttttgaagataagttgcttttgctgaagtgtcttttggcaaataatcatttagtaaaatttgagtagtatttcctgtaagcccccaggaagattttgttgcagtatacgcttctgaataatctttatctaaattaattacaagatcatcatagccatttgctttaactgtgaccgtaccaacatgaaattttaatgtacttgaatccccctctgcaaggtttccgtccgaaatgtttataccaaagttggcagtagaatttgactttgcaaatgcactattagcatctaccgcattgaaatttgtcacatcctgatacactagactagcagtatcccccatactcatccaagtccagtcatcagtattttgtgtaaaagcactggcataaatctttgtcgtttcgcctttcgttgtgtaaatagattgtgcgtcggcatgtactttaagagaagtatttccaacagcacaagtgaataacatagctaaaccagttactaacgatgttattcgttttttgttcctcatctcaaatcattcccttcatatatcttatagaaattatgtaaaaacatatgcataattatgcctatgtacttaccaaaatatttaatgtaaagatatttatttacgccatagttatgtattattttaccactataccctttcagtgtaaacttcttgattatatacataatttctattaattcttgttgtatcttacaaccttctatttattaagataaacgctaaaaagctaacgtttataaatatttctagtaattactttatacttttttaagtaaggctgtatactttaacattttagtaagttattattattacatacttcttttctacatcattcactattaatctcactaaaattttgcataatataaataaattttcaaacactattataagctatccttaaaatttatatatagaggtgtacctatggaaagtgtatttgattacgaagatattcaactgattcccgcaaaatgcattgtacgtagtcgatcagaatgcgatacaagtgtaatattgggagagcatagctttagactgcctgttgtacctgcaaatatgcaaactattatagatgaaaatatagcactctttcttgcacaaaacggctacttctacattatgcatcgttttgaaccagagaaacgtttatccttcataaagaacatgaaatcaaaagggctctttgcatctattagcgtaggcgttaaaagggaagagtatgattttataaaacaattggcacaggaaaatctttccccagaatatatcactattgatatcgcgcacggccattccaacacagtaatagaaatgatacagcacataaaaaaatatttacctaaaagctttgtcatcgcaggaaatgttggaactccagaagccgtaagggaacttgagcatgctggtgctgatgctacaaaagttggtattggaccgggaaaggtgtgtataactaaaataaaaaccggttttggaactggcggttggcaattagctgcattacgttggtgttcaaaggctgcaagtaaacctattattgccgatggaggtattcgaactcctggagatatagctaaatcaattagattcggagccaccatggttatgattggttcgttatttgcaggacacgaagagtctccaggagaaacaattgaaaaggacggaaagctgtacaaggaatattttggttcagcctcagaatttcaaaaaggagagaaaagaaatgtagaaggcaaaaaaatgtttgttgaatacaaaggtccactaaaagatactttgatagaaatggagcaggatcttcaatcttctatttcctatgccggtggaaaaagtttagacgcaattcgtactgtagattacgtaattgtaaaaaattcaatctttaatggtgacagaatttactaactatctctaaggaggcttcctataacacggaagcctctcttattattataaaacctctttagtattgtatataagtctattttaaaagcgactttaccctaggatcatctttcacaaaatctagagctttatcttttatgattgacattcttacaatttttttatacctatctttatccaaactattagtcacttctatttttctatgtttatatagttttgatctcataaaattattcatgctgtctgcattatctatcatatttctgataagctctacagctttttcttcatcccttttttcctttattaaagataattctaatgtatatttgctgtattcccccaaatcaaacacctcaaccagcttcttagctctttgtgtatattcttccgcttcactaaatttattttcttttaataacattcttattattaaaaccatcgctcccaatgattcctgagcattgtacagcagtacttcttcacaagcaccataggctttatcgaattcaccactgctttcaagtagaagtaactgctgaatttttttatcactccctagttccatatcaggaactttatctagtatttcctttgcttttttatattcttttttatctcggtatactgccgataaaaatattttagccatatctgctgtcttttcatttctacttgctgccacaatttcagcccaagcaataattttgtcctcgtatatatcttttttctcaaccttagctgtaactaaaaacagccttaatattgatgatattctcaatatcagctcatcgcagctcgaatattgctttattaaatcactgcctttttcaaaagccttttgatatccttctttttctactatctcaccaacgcttcttcctagtttatttacttccttttctgttaattcctcattgaatgccagcaaagtattaacatctatttttaaaatacgtgcaagaggtgctagcagtgttatatctggatatgttattccattctcccatttgttcactgctggtgtacttatatttaaataattggcaacctgctcttgagtaagattttccttttttctatgacttctaataatctcacttattcccataaaattaactcctccatctatttacagtctccgttaattaaaatcatatcaaagcttcacaatttaaacaattgaaccattttcattttttattcatcaaacttaaccgttagttaatttttattatcctccaaaaatatcttaaaatttacttattaactttaagatactatacaaacatttaatatagtgtcccaaattataattgtttagtttataataatattattaaaaaaacttactagtctataacttagattatctataactcatatattactatttaggaggttattatgaacgaaccaataactaaaaacaaaattattaacacatcttgggaactgcttagacaagaaggtatctcaggtttctcaatgagaaaattagctaaaggtgttcaattgactgtatcttctttgtattatcattttgaaagcaaagaagctttatttagtgaaatgataaatcaagctagtggaagaattgcttatcctatagatgaaaaagagtgggatatgcgtctaaagaaatacgcagaaaatattttaagtattttaaatgagtatgaccagttagcccaactattgatgatgtatccacctatgagctctaattactgcaagctattagataacttattaaaaatcgtagaggggctaagcttaagtgaagaaagtaaattgtatgccattaacagctacctaaattatatccttacttttaaactagatagtgataacttttctcataacgcacaagtaaactcagatggtttttctgaaagtaacacaccctatttatataaattcaaaagagatggtctttttagcaaacttgggagccatgagatgttccaatttggaataaatattttcattggtggaattaaggcattagaaaaaaatctttaaaaaagagatttttttctttacacacttatcgaacagtgttattataattgcagaacgatgttcgataaggaggttacaataatgaaaacaaaaaattattttgatttaaaaaaagttttacctgcggttttaaccattgcagttggtatgttgcttgtcatgatggatacaacaattatgaatgtagctttacctcatattcaatcaactttcaatactaatctcgctacctctcagtgggcaataacagcctatactttagcaatggccgctgtaattccttattcaggttggctagctgatcgtttttctgctaaaaaaatatttggtattgctatcttattttttactatagcatcacttttagtatcaatttcaacaaacattgaacaagtaattttttatagaattttacaaggtttatcaggcggaatagtaggtcctattggtatagcaatatcctttaaaattattcctattgaaaaacgcggaagtatgatggggcttttaggattacccatgctcctagctccaaccattggacctgcattatctggattcttaatcaaatattataattggcatacaatctttttaattaatattccaattggacttttatctttaatacttgttttcttgtttttacctaactttaaaagcaaacacaataccaaaattgatttaagaggtgcatttttgtccccgttagcttttccactgctaatctacggggttcacgttggttctgataagggctggcaatctcctatatctattatatctatagccttaggttttctcatgttgcttacttttatatttctagaaaccaaaacccaaactccattgcttgaagttaaagtttttaaaatatccgaatttcgtaaaggcattatccttatgtggcttaaccaaattgcagtttttggatcaatgttactaattcctttatatttacagaatatacgtaactattcttcgcttgaagctggcttaatgatggttcctcaagcaatcgcaagttttattggtatgacagttggcgggagattatttgacaagtacggtacaaagtccgcagctattccaggctttctactaacgggctttagtttaatattattagctcaaattacaaacactactgcactagcctatttgataatctgcattattcttttaggcttaggacaagggctagtaaatatgcaagttaataatcacgctctgcaatctgtacccttaaatttaatcaaccgagttaccccaatgacaaatgaattactacaagttattaattcactttcaattgccttcatcacagcatttttatctaaccaaattaaaacagcttttagaaaacattctttagccgtatcagggaatattgcttttcataacacctttatactgttaacaatatttatagctatcggtttaggtttaactttcttcttaaaaaacaaaaaatccaaagaagctagttagcctatgttattaatttcattcatatttaaagggctgttgcaaaactatttttttagttttgcaacagccccgtctttataacttttcaaataattgcatctacagattttatagttatttctcacagtaaattttaattgcttttgaaatgaattctgctgtcccttcaccattactgtcaatgtttttcttaaaacgctcatcttcaacatacatataacctagaccccttagaatatcatttgtacaattataaaagctctctgtaataaataactgccactctttaacaagttcctgaacctctttactttcaggcgctttatccctattatcagcaaaagcctttaatatattcttacattcatcgtttattttttgccactcctctctaccgtaattactggttttcttctcactttcgatataagcgtcagaacctccaaaacgctccttaacttcttttgcatacttctttttagactcttcaatttcggtcatatcaaattcttcaaaactcattttaccttctccttttattgtattttctacaagagttataagcttatcaattcgctcgcgctttttaataagtaattctttttgcctttttaatgcttctgctgtgtcatattgagaacttctcattatttctttaatttcattaagaggaaattccagttctctaaaaaataatatttgctgtaatttagaaaggctattttcatcgtataaacgatatcctgctcctgtaatttcactaggtttaagcaatcctatttcatcgtaataatgcagcgttcttatggtaatgccagtcaactttgcaacttcattaatcttcaattttagaaatcctctcctttctttcagtatagctatacaatacactattacgttacgttaaagtcaatagtataaattaaatagaaaggagaatctttttttctaaagattctccttcttttattatacattaaatttggataccattttgtaaagattatcagatccttcgttagtcgaatcaatgattttcaccaattcatttgctcgatttactattgaagctaccttttcagcaatattacctgtaccaattgctccctcattagttgcttcggctatactattcattgtcataaccatattctgtatagaagataatagctcttcagaagtcgcactgaaatcacttacaatttcgttaaccaagtcagcatcaagcttatattgatctgtagcctcaagcattgtacggtaatcattattaacctcttcttcaacaaattggagcaattcattggaattatcagataaaccttcaacagaatttataaccaccttagtaatttcttgaattttattgactgttacctttgaattttcagcaagctttcttatctcctctgcaacaactgcaaatcctttaccagcttcacctgcccttgctgcttcaatagatgcattaagcgcaagaagattcgtttgagaagttatttgtaatatagaatcagtcaattcattgatttgctccacagcttttgattgcaacaaagacttctctaattttactcttacactatccataacctcttcagcgttattatacgaaacagaaaaattttcttttaactcatgtgcacgtttactaatatcccctactgacttcgacccttcaagtgctttacttgcaatgttgttaagcgctttttccatttccgttgtggtagaattcatctcttgagtcgatgctgctgtttcctccataccagcagacagttcttctgtagttgacgatatatcttctaactctcctttgagatatgacacgcttttatttgtttcctttattgttgtttttaaaccttcagtttcaccgactacattttctacaatacttctcatttcccttctaacaccaatttctgcattaataatttcagcaaattcatctttttctattatatatttttcatagcttttatcatatttcaaatcgtactcagcagtcttattcattagtcccactgctgttttagttctttttttaacattattaattagatatattccaagcaaaatggatataagaattgttaaggctgaaatactaataataatatttataatatatcttacattggcgttgctttgagccattatagatttattataatcgtccattacttcttcaatttgattgatagattccctagccatatcgaagttttcttgatatttgactttgttagttaatacatttttattcacatcgaagagttttgaccaattagcaaaatctttatcaaagttatcaaaaagctgaactatcgttagctttgagtctttatgcttcatattcgcaaacttttctttatccttatatagtatatttcttgctttgtgcactctctcaattgtctgattatagttttctaaaaatgaatcctttgatttgttcaaactttcaacatcagtgcttttctccatttccatttgtgcaaatagtgcctgataaaaatcacgatctgcattataaagccaatattgacttaaatgattctcttcgtacaagctagtaattagatggttattaactttgtctatatatcttacgaaaatacctgtgattagtattagtgacgcaacaggtattattaaagtgaatatcatttttacgcttaacttgatattgttcaatttcatcttcttcatttgttttctcctctccaaatatttcatagttgatatttggcactttaataattattcttgctagtaatttcgtataaataaaataatagttaagcggtaattaatgcctacatatatactttaatgaacttataaaaactcatatggtttatccataagtatttttgcaataataatagttacaagcagagacagtgaaatggatgaactaatgagcatgaatttaggtgcagatgactttataacaaaaccctacaatactcaaattcttgtggcaaggattgcatccgtattaagaagagctcatggttctaactctctagataccattttttataatgatttaaaactcaatttatcaaatggctctattacctaccatggtaatacaacagaactaacaaaaaatgaacttaaaattctttcttgtttgatcaagaacaaagggaaaatagtgtccagagatgacctaatgaattttatgtggaattcagatatattcgtagatgataacaatttatcagttaacgttacaatattaagaaaaaaactcgaagaagtaggaatgaaggaaaacatagaaacaagacgtggactaggatatataatgccatgagtttattggaatatttaaaaaacaaatttttattcttattaattaattttgtattattcgttatcgtatgcggcattatgaacctcattaataatagaaaatcctattatctcagcttccatatttattctatctgctgtactgttaggagtggcctacaatttagtactaaaaacagggttagatcctaaaaatattaaatttacaacctccattatacttggagttataggaaccttattgttgtttttcagtttatccagcttctttctatatattgtacgaaggaacaaaaatatttaccttaaaaatttaaatatttttgtattaaggcagatacacaacaagataactactaactttatatcaatgtctgtaatatgccttatgctctttctaactattacacttctattcactatgttcagctataaaagcagcctagataagatgttaaaaggaaacactaccttcgatgcttcagctcatcttaatatcgatagtaatagtcaaagcatgcagagtattaaaacgtatctaaataaaatgaattttaaatttaataattatgaaaggtatactttttataatgagtaccaacttgatatacagccaaataatttgttcaaaagttatttagacataaaaaataaaactgcttctgaaaaatactttttggaagttcccatatcagctgtaaaaatatctgaatataattcaatacgaaggttaaacggacagcaaggtattactataaaggataacgagctgttagttgcatccaattataaagagcttaatagcgctgtagataaattcatacaaaacaaaaatctattaatatagacggtaaagcttacagaattaaaaatgagactccaattaaagataatattactacagggtctgagttaaattccttttacttcataatccctgataacttcagtggaaatctcaagttatactctacaggattcaatgtaatgttccccaaaaataataccgaaaaatcagaggcgagatttaaaaacttatttaaaagcttcggtaagaacaattacgagaacagtcctacattcctatctttggaaatacaataaaacaagtacatggactagtatatggttggtcaacaatcgttgtatttattggaatatacttaggcatagtatttttgatatcaagtgcagcagtattagctctgcaacaactatcagaagcaagtgacagccttaatagatacaattccttaaagaaaataggtgttactcataagaatgtaataaaaaacagtaattaagtatgtctactctcatggaattttattttgattattacacagcttctataaatgctttattccttcaaatgcataatttataatttcttttacaaaagccacatcaatcttttctccagttattaataatctatagaatataggaccccaaattaaatcaataatcacctcaatgttcaaatccttttttagctctccccttaaaattcctcgttctagaattttttttgaaatacttcggcgaggtgtaaaatacgccttacgataaatatcagctaatttaggatcatattgtccttcagctattatttcagtaattacactcccttttctgctcgttagaaactttgtaaagttatccacttgaataaacatatcttgaatagttgatccagtatcaggtattggaagttctacattagtagtatttaagaatccatcaataatcacagccgctttattaggccaccatttataaatagtagctttacttacattagctctttcagcaatcttttcaacagttatttctgcgaacccattttcaattaataattcatatgcagcattaagaatatctgattttgttttttcacttcgaggacgtcctaactttttatccatcataattacctccatgacaatctatctataagtatgcatttaataaactatacgtatattataatatatatttttctattttcaacataaatccctctttacaaaactaaacgtttagtatattatatatttataaactgaacgtttagtttctttatcgttaattctatttattaaaaggagtggattatcatggaaaacttaaataatgatcttatggagaataaatctatattgaataagttattaattatggttatgtctatagcctgtggacttactgttgcaaatttatattatatacaaccattgctggcggatatatctaagacatttaatgtaagtgaaattagtgtaggctctgcagcaatgcttacacaaataggatatgcagttggaatggtattgatattgcccctaggagatataaaagaaaggcgaaatttgataactacgatacttctgttttcagtaatctctcttgcaagtatgtttttttcgagtaatatctatattttaacaatttcttcttttgcagttggatttacttctatcatccctcagcttatcatcccattagctgctcagttatcaaatcaaaaggatagaggccgaataatagggacagttatgagcggtttattaatcggtatattagtatcgcgtacattcagcggtattttaggtgcttattggggctggagagtagtgtatattattgcagctattatgatgatatttcttatgattgccttaagaaagttactacctgtaagtaaaccatcctctaacgttaaatatattgagctattaaaatcaatgttccaattaataaaaagtgaacctgttttaagagaagcatctatcaatggagctatgatgtttgcagcttttagtgcattttggacatcacttacatttttactccaaagtcctcattataatatgggctctcaggcagctggtttatttggattagttggcgttagtggtgccttagcagctcctttagttggaagaatagctgataagaagggtcctagatttattataggcatttgtatacctattataacaatttcctatttactatttctcttgcttggatttaaaatatttggattaattttaggagttatgctacttgatctaggagttcaatctggaaatgtttccaatcagactagagtacattctttaaatgaaaaaatgcgcaacagaattaatactgtctatatggtaagcttttttcttggaggagcattcggttcttttatgggttcttttacttatgtacactttggatggtacggagtatgtattttcggaatatcaactcaaattataacatttattatccataaaatcacaaaataactttactagagagattcttaggaggaatagaaaaatgaatttaataactgtaaatcatgataagtgtgtcaaatgtggaatttgtgtaaatgaatgccctgagcaaataataaaaatgaaagaaaatagtccagaagatgtttgtcctcaaaaatgtatcgcctgcggacattgtgtagctgtttgtccaaaagaagctattgataatgtaaaaacaccattaatcaatcaaaaaagttcaaaaaagttttcaaaattgacccctgcagaggcagaaaactttcttcgttcaagacgttcaattcgatcttataagaaaacttctgttccaagagaaaaattaatggaacttgttaatattgcccactttgctcctactggaagtaatctacagagcgtatcttatattataatagacgatagaaatatacttaatatggctattgaacttactgctaaagaattggaacgtgatgaattgttaagtaagaggtatgctgcctatatcgaatcttatcttagtaaaggaattgattctatattaagaggggccccttgccttgtcctagcaactgctgatgtagatttcccacgtggaagagagaattctattttttcattagcatatatggaactatacgcacctacgcttggattgggttcatgttgggctggagtttttgaaaaaattgcacttaaggataattctccgatgcttaaattatttaacgttcctaaaggtaaaaaaataactggtgctgttatggtaggatatccaaaatataattatccaagattagtagatagaaacccgttagaggtcaacttttaccaatctaagtgaaaacttaaacttatcacaaggactactctattacagtaaatccttgtgataattataactttcctttttaattttatcttttttactttttcttactaatttcaagaataataaccttgatttttcgtaacatagacttttttaatactgtccttctatatttatttttcaatatttaattttcttcttaatatatctattctataaaacctctttgtttgagtaatgtctcagtatcactccacagcttattttgcattactttatcaccgcctggatatattggacttatagggttccctgttattacattaaaatatccacccgttacactattatattgggcatctatggataaacgaagtataatatctgctcctttacgtggatctcctatatgaaaaaattttaatatgcgttcaagtgcagtagcaaaccatagttctcgtccaagtcccgtaacattaaagcctggattaagcgcattaactataattcccgttcctgaaagtcgacgtgctagttctgcagtaaacataatattcaataatttagtttttccataaatcgcagacgactctctagatgtaaattctgatatatctgtcaaatctcctggtaacttaagctcaccatggttacgagacgcttcagacgcaacatttacaatccgcgcattccttgatgcaattaaagattggagtaaggtattagttaataaccatggtgctaaatagttaaccgccatcatctctgcaagcccatcggaagttactctctgctcgaacgcatggagtccagcattatttactaggacatcaatcctagggtgaacagctttaatctcctcgccaaccctttttacgtctctcattactgacaaatccccaaagaaaaagtcaattttagctttagggttaatactctcaagcatttttttagttgcttcagctcgttccttgtttcttgctgttaatatcaaatgcgcatctctctttactaattcaattgccactaattttccaagtccacttgtagctccagtaattgcaatagtcctgaatttttccatagacatcctcctgtagtaatgcagtataatatagaactcattatatgttttttacaatatattttaattccttgacatgatttagataattaaatatacttgatatatgtcaagtatatatttttatttgatatatgtcaaatactttttattaaattaattcaatcgaggtaaactatgaataacaatactcaaaataaaactgataatagaattcaattagaactcaagctaggagaacagctaaatgtaattataaatgcctcacatgcacttaatgtgaaaactgcagcacatttcgattctacattacaacctgctgcttttctaatagttcgttggctattttcatttggtccaacgaatgcaacggttctatcaaaatcaatagctatggatcgtagttctgttagtcgccttgtaaatcaactaaagaatatgggctatgtaaaaagcgaacaatctccaagtgatcggagaggcgtacttctatccttaactgaactaggtcatcaaagaacaatgaatgctttaaaagaaaaagaatctgctttctatgaacgaattgcaaaatgggatgattccaaacttgagagctttatcgagctcctcatggattttaacggcttggaaaataagtaacattgtatctttcatcaagtatacttcttatcttaaatttaatgctactattgcttttaatgaaaatctccgttatttatggtacagttttctgtaacgtggataacggagatttttttctttattaacttcaataatacctttaactttaaagcttatcttataaagttggtaaatattttttcttctatttcattttcctttacattatttttgctagaatcaatcgtcttcaatagccatgccatattttttcctagaactctcatgatctgcattccctcttcatcttgtgttgcttctccaggttttgtaccatgaattacattccaataatttgatgttggcatcatcatctcagaataattgatatagttatttagttgattgaataccggaataccgcctgatcttcttacagcaacaacacttgctcctaccttatgtctaagcattccgttatttacagatgtaaccaaaaacgcacgatctaaaaatgatttcattgttcctgcaatggctgaataatgtacaggagaacctagaataattccatcagcttccttcatcttttgaatccaatcattaacctcatcattcttcataacacatcgttcgttcatgtttctgctgcatcctccgcagtccaggcatccacgtattaccttatttcccacatgaataatttctacctctatattttctttctctaactctgccgctacagcttttatcgcctcattagtatttccattctttttcggacttccattaaaagcaactactttcatatatatacctccatataatttgttttcaaatatgtgtccattatatagttcaataatacaagtgccaagtacgcactttttcgttagactacttacctttaagtaagatttaccgcgatacctacattagcatgaaataaaattttactagacaataatctatgtttattttaatttgaaaatttgctattataaagttacttagtatgaatgtacagtaaactaaattttatcaaatataaaagattgaaggtagataaataaatgataaattataatggtaggcactatgtatgtttattagattttgcaatggattttattagaggtaaatggaaggccgttttattatgccatttatatgataaacctagaagatttttagaacttcaaagaataactgaaggtataagtcaaaaagtactaaatgaaaagcttaaagaattagaaaatgaagatttaataaataaacatatttatcctgaaatcccaccaaaggtcgaatattacctcactgaaaagggaaaagaccttactaaaatcattaaggaaattgagtcttggtctattaaatattatcctcacttagatagtgattgcagataacctgatgtatatagaagcttttttatcattatattagctgcaacctacgcaatttccattaatataatatttagtttttaagtgactttattttttaatatactcatttccccatttgctcataagctcaaggattggtattaatgtcactccctcttctgttaatgaatactcaaccttagggggaacttcattgtattgttctctatgaattaaattgctaatttctaattcctttagttgtgaacttaatgtcttatgtgcaataggttctaaacttttccttaatttattatatcttattactttcgctttatatattttccataaaataatccacttccactttccctcaacaacagatattgtataacgcattccacaagttccatatttatcttcaaaactatccataaatttcgctcctttatatcctcgaaagagtttcaaacgctgatgcaattattttaggttctccaatattcctacactcagttactagtgctatgaaagctttcttagaaaggcttatctttcaatatctagtttatgatcaagaacattcaagtctttttaaaagaaaaatacctattggctttatctatacgatgaatgtaaccaatgacaaatttaaagctgactatgaagatcaacttaagcctattgagacatacctagaaaaggcttttacttcttttgaaaccttaattgtcaatgatacttaccaatttgatgattactcaagatacgttacaacattatttgatgaaacaaaaaaaagaaaagttaaagaaacgcaatttccaaaggattgtgaaaatgcatttgatatgggaaggcgatttgttaaacaagccaatatataaatattttcaaataaaataataaggagaactggcctattgcttagactcatttctcctttaatactttactttattatttaagttatcattataaaatccttatattcttttataatatcggtacacaaatttcacaataatgattatttatcatctgcactgcatagcgttccaggataggccttctatcatcaagtttataatttctttttgacaactccgaaaatatctccatccacgctttttgcaccttatccgctgtatggcttattttaaatacacaatactttccaccaaaagtttccccaaaattaatataattattattaaccttaaattcatctgaaacaactaaacatgcatcataacgacaatctttaggctctgtaactttagggttatcttgtgcgattcctaatataattgaactttcattaaataagttttcttctctagcccaactttttaattgttccattatttgtacattatctaaaccataagctcctgttcttcttatataagcaattttatatgctggtatcatttcaatattagtatccataacctacctcttttttaaataaagtacatcgatgtctggattcataatataatgctttaaaatatatttcaacttgttttttaaaattattatgtttctacttatcattttgtaatcttaaagcttaagatgctaaatttatatgcatatacccatatgataccaatgttgttatttatattgaaacgacttaagatatatgatactattaccacaaaacaattgaaattgtaaaattaaggagtgttcttataatgattgatgaaaagtttttgattgaaagtaatgagttggttgaaagttcaaaaattgttatggttggtactaatggagaaaatggttatcctaatataaaagcgatgatgcgattaaaacatgatggtctaaagaaattttggcttagtacaaacacatcaaccagaatggtagaacgcttgaagaagaataataaaatatgtttatattttgttgatgataataaatttgcaggactgatgcttgtaggaacaattgaaatattacatgatagagcctcaaaagaaatgttatggaccgatggttgcgagatttactatccattgggtatagatgaccctgactatactgcattatgctttacagctgaatggggtaattattaccgccatctaaaaaatataacctttaaaatagacgaaatttataactattgatacaagtatagagctattggctatttaccaatggctctatactttattattaattcaaaattttcttatagcgttagacttcgtttgctttataaaactcatccttctgaaataaaccccatatgtaatttaaatacttacgtgttaataaaaaacaatgatacatataattgatgatgtcttacttccaacctatcagcatactttagatatgtaattaatccaaaaacatcagactctctaaattttctatatatcaaaacctatttgaacttcattatttttctcttcaaaagttctcatataattaaaaacttctcttatatcacaaataatattattcttattacaggtttctttaataatcttcataagcttttcatgattcttacttactacttcataactgttcccatattgtcttatgtatttttcttttaaacctttaaactgcttatctaaattcttataataatattctctgtttccatttcttaatgttaccccaattccaaatactataattcctttaacttcagcttctatacagtaatctaagattcctcttatattttcctccgtatcatttatataaggtaaaatagggcttagccaaactactgtaggaattttgttatctctcattatctttaacacttcaaatcgttcttttgttgtagaaacatttggctcaataatcttgcataattcttcatcataagttgttaatgtcatctctacaacacactttgctttgttgtttatactttttagcaagtccaaatcccttaatattctatttgatttagttagtatcgataatccaaatccatacttatcaattatctctaaacatcttcttgtattttgaagcttttcttctaggtgaatatacggatcactcattgcacctgttccaatcatgcacttttttctttttctcttaagcgtatcctctaatagctctactacattagtcttaacctctatgtcttcaaaaatatgatccattccataacaaagacttctggcgtcacaatatatgcatccatgagtgcaccctctataaatattcattccattattgctcgatagtataccctttgctagcacatcatgcatataatcgtaactcccctctaatatattgtacctcttaataattacttgagcgaaatataaatatcaaccttagcattattaaaatccgaatttaaatattcttcaaaatctgcttcatagcttctatctaaattcatttgccaaattttactccaagcttctgctactgccttttccatatgtccttcaatagaaaacttagcatattttcctgcaggaattttctttattgtaagtgcttcattttcagccttacatacctcatttcctactgtaactacatacttattatcctcataatctgaataaagtcctattgcatattcattcaccttattttttattgtttcattaataccaccttgatataacttttcccaaagacctccaataactttccccatattgggatcgtcattacttgtaacagcactaactcctaacactattttttcttctaatttaacaatttcatactccatatttataacctccacatatttgataaggttattatactcagattaatatgacaactgcatgtcatattaagaataatttaaaagcattttttcaattttattttttatttcttctcttatttcttgtggtgctaaaacttcacattcctctccaaacgaagatatatagctaaaaagccattctccttttggatattcagcagtaacaataaaactaccatcatctaacttcttaaagtcttcaaattcatcatatattctataggccattttagaagaaattttcatctttagagtaataaattcgtcataaaaaacattatcttccttcattatcttttttggtgctttaatattaaaactctcttcagaaacatataaatcctttatccttcttagtttaaaaaatctatagtcatttcgtattccacaatatccatacatataccagctttgccctttaaaacacaattttaatggacatactttcctactgatattttcacctttagcactgctataatcaaattttactacttttttacttaatattgcagttttaagattattaaaggtttctttttctttttctgcatttccccaatttgaaaaatcaacttctatccaatcagtatcattttcacctaatatactatttaattttataagaaccttttcagcttcagaatcactaaaatttacagcattaacagctcttatagatgatattatttctgacttttcttcttctgttaatatggctttatttaatataaagtttggtaatatagatatacctccaccttttcctttagtcatatatactggaattcctgctgtagaaagcgtttcaatatctctataaatagttcttttagatacttcaattttctctgctaattctcttgcagttacactattcttctctaaaagaatatatataatttgaaataatctatttacttgcataatgttttcccctttgttatacatgcctttgtttaattaatttttattgcagatgttattggtatgaagtattaaaaaatcgcaaaatcaatttcatattgaataatgcgattttttaatcggttatctagtatattaaaagtttatccaactaagttttctccatctttaaatgctcttaaagataattcatcaaacattgctaaatcaggatcatggctagttccacagtaattaatactgtcctctaatttccaccctaactcttctaacatatcattagcgaatttaacgccttctgcacctattttaggatctggatttccttgagcaaatactgttattaattttttacctggatattttggtttataatcattcccagtcattggaaatgtgcgatcaaaccaaatctttgattgacccgtaattttataataatagattggagaaccaaatacaatagcatctgcttccttgatgtcctcatacattggttgaagataatcattaacagcacaaccatcatgcgtacgacaataaaagcatccttgacatccacgaattccaggattatttaaatcaaactctataacttcagcacctttagattttgctccttttgctacttgctctaataattttgcagtatatccatttttccttggactacctttgaaaataactatctttgacatttcatatctctccttttaaatataaaattctcttaaataaagccaaccatctattgactaacttcattatattaagtaacatatagatcaacaagtacgcaaaaaatatttagctactaatatttatataagtattggaggttacttttatggagaactgttctatagactatgctttaaatgttattaatggaaagtggaaattattaatcatttggactatgtcccaaaatggagttatcagatttagtgaattacagagaaaaattaatggtatatcaagccttatgctatcaaaaaacttaaaagagcttgaaaaagactctcttgttattcgtcatcaatacaatgaaattccaccaagagtagaatatgaattatcagaacttagtgaaaaactcatagttgctttacaggttcttggtgaatggggaaatgaagtttataactacaaacatcaagctacctaatccaaattttctataattatatattaggatttatcatcaactttcttcgcaaaataggagaaggagaaacacctttatcatctggtgatcctcctctcgtaatatatttattattttttcatcattgccccaattagtttatgcttgtcttcttataactttctcgcctatttttcaaaaagtttacgagcattagtctgaatatattcaatttcttctttagataaatcacaaaaatcactattatccatagaacaatttgaatcttgtacatacatcatctttgtatccttctgtgttatagagtagaaccagcactctgcaggaacattatacacttttcctttttccattaaagtcaactcaatattaaatttatcattttctttttccgcagtaattaatattgcttttccagctgacaaaataaactgttcgtccgttgagtggtggatctctaaatgagctattccctcaatatcattatctggcttccaatttttaatacaaacaagccatttttcatttttatatacacaaagtattccttctctattattttcatatatatctggtttcatttttcatttctccttttttaaatttatatttcagtttttccttgaatcggaactccgtaaccaaatgcaccttccatgccgcacacattagccgcaaatattgctccgcttttcatagcactttctaatcttatcttcatgctttcttttgttccttcaactaattttcctgtttcggatgtctgtaaaagcgagcaaaggaaagttgaaaaatatgaatctcctgcacccattgtatcaataatattggcagccataatagcagaagtatacaagaaatcaccattgtagagtacatatgatccatcttctcctattgttccaaggactattttcactccataattttgaacttttttcatttctttttctcgttcttcagctgtcaaatgagcacatgataagattgccacatcaatatacggacaaaccttcaaaagatattcatctgtccatctcatagaaaaatcatacgcaattggtactcccgttgcatgaagctccttcaaattatcttcaatatagctatttaaatttgtgtaaatcaaatcaaactttttaatgtattcaaaatcgttttcatcaaaattataagaatgctctttagcaataccacctttattggaaccaaggaaaacacgatcagcatttttcaaagtaactagagcaaatccattttctccttcataatgtcgacaatggctgtcatcaattcctatctctttcaatgtattttgtacacattctgccacttcatcatttccatactttccaatgtatgcagtctcagctccattcatctttccatatacacaagtgttaatgcactgtcctcccggatacatcttccctcttgaaaggtatttatcacatacattatcgccaatagcaacaattttataattcttcatttttcttctccttctataacagtatttaaattattaagcagagaaactagtaaatctattctaattcatttgtattctctttcatccaagaaacaatatcatcaatagctttatcaggattgcaataatatcttctatcacaaatttcaaaagaaacattccctgtataacctctttttttgagtgcgctataatattctttcattggaaaatctccatctcctggtactgtatgccctctatcgttaaaatgaatatgctgaattttttcgccaagattatcaaaataatcgtcaattgtctctcctgcatatgtcatctgatctaaatctatcatccctacaatattcgcggaatcgatttcacgaatcatatttgaaatatccttactcgaaatcaatacattagttgtggttgcttttaattcctcaagcattaatctaacgttttttctttcacagtaagctataacctgagctaaagactcctgacaatacttccacgcttcatctcttggctgattaaaatatccaaaccctgtactaatttgaacattgctgcatcctaaaaattcagctgtatctattgctctttgataatagcgaatacttgattctcttgtaataatatccggtgtacaaaagttaacaggatacgtgcagttttcaggtgtaattgccattacatttagctttcttcttcgaatatttctatccaattcaattagttttccaagtgaataatcaaaaatatttaattgcggtgctgaacaataaagatcaatactatcaaatggagattcttctaccttatcaagaaatttttctattgggtaacgcaaataatgataattcataggagcaaatttcatatacgcatcctccttcactagcttatactacagcttaatcatattaatttatactatactagaaaacgattgcaccaagtaccaatgccactcctacagatgctattgtacatacaagtcctggaagcatataactatgattcaacacatatttacctatttttgtagttcctgcagaatcaaatgctatcgcagcaacacactgtccggatgctggaataaagtagtttgaactgcaagcaagccagcctgcaataatgatattaactggaagccccaaggcaataccaatcggtaccataatcattgttgtggaagattgactagtagtaattgcaccgactacaaaaactgctataatataaatccacggatattgatttgttaatacagacatatttttagtgataaaagaagcttgatcgctaataaatgtatttactaaccaacaaagaccaaatgctaatactactgcaaacattcctgttgtgaatactggttgttctaaaatttttgcactatcaagtttagttgcaagaactgtaatagctgcagctgtaagcataaaaatttgaattacagttgtaagtggtaattttgtgttatgtgcgaatactggaagaagcttgtttgctgctcctaagaatacaatactaaccattgcaattaaaaagattattacagaaatttttgcttctttagtagagggtttttcatttctttctactttagagaagtcttgaatctttccttcagatacacgagcttgaaattcaggatcatctgctaattcttttcctttctttatcactgctaatgcacataaaacggttccaactaatgttgctggaatacagacaataagtaatgtaaaaatattaacagaagtatattgtgctttagccataaacgccaatactgctacagtagctgctgaaattggacaagctgttatagcctgctgtgatgaaacaatagatgctgaaattggacgttctggacgaattcctgtatcaatcgcaatttcattaataactggaagtaagctgtatacaatatgacctgttccactcataaatgtgaaaatataagcaataaccggtgccaaaattgtaagcatcttaggattttttcgaagtatcttttccgctatcttaactaaaaaatccaatcctccacatgcttgcattgtagctgcagcgcaaattactgcaatcataatcaaaattactgtaataggcggatcagctggtgctacatgtaacccaaatgtcataattaacattccaagtccaccagccattgccaagaatgtaccaccttttcgtacacctagaaaaataatagcaagaacgattactaactctacccaaaacatagattatcctcctcaatgttagattcatttttttatcgcttgttgtaataagttttattatttaagaatggtgcacacattcttagtaatacaaaatcaatccggctttttcgtgttgctttgtattatattgtattactttgtatttgatataatggtataccttgaatatatttttgtcaattacattttaatgtttatttaatatacacaattaaagtcattgcttattgttccctattcctatacaatcgttttcaatgtcttgaaataaaaaacttctccataactacaacttcgtattttcaaagtataaataaaagtattttaaataatacttttatttatacgcatagtgcttccataattccctcaagtaaatatttaatgttttaatattaatattccactttccacatatagcgacgagtaggtaacggatgctcacgttttgttgcaagttcatggttgtatataggatacacattattgaacaatgaatgattaaaatagtcaacaacagaagcatcaattgtagaaagaccaagttctttagcatccaatacctctatacgctttgcataggtatttaaaaatttaagagctctttcatccaaatcacgtgttgaaccctcagaaatctgaatcatgaacggacggtttgcatcggtaatttcaaaaggcccgtggaaatattcgccagtgtgaatactactagaattaagccattgcatctccataaaaatgcagatactctccatgtaagcagctccataacttgcgccacttcccatagtataaataactgaatcatctttatacttttcagcaaatttcactgctctctctgcaacatgattacgagcattttttataatattgctaatcattttagtaccttcatagaatttattgtagttttcatatccttctgtctgagctaaaagctctactgcaaccaaaagggcacatattgtcttttcacctgaatagtcaatatctcctttaagatgatctggactagcatcaaaggtataacgaataatataatcgccaaattcgatgatttctgattctttaagccatgttagaataataacagttgctcccatttccttaccaagttttgcagccgcaattgtttctggtgtatttcccttatgacatgctaaacatattattgaatttactccaaaatcttttggtgtactgtgaatgaactcactactattaatccatgcagatttaattgaagtacattctttttccataaaagtttttgctggataaagggctcctaaagatcctccacatcctacaacataaatacttttcactccgccttttgctttctttttatcaagaatttcagaaataatacttttaatatctttgctagaataatccattttaatcattctcctttgcgttattgtattcatttgtttctatatatactataatacaatataatacattgtgtcaatggaaatttttatttttttattgatatacgctatatacattgatttatctttgtattataataaatacataattacaattaggtattcatatggaggttatatatggaactaaataatacaattgctacacctttgtacaaacaattagaaaaaaaactgcagcaagaaatagatagtggtaaaagacctgctggaagccgtcttccaacagaaaatgaattgagcaaggcttataatgtaagccgtgtgactgtccgcaaagctcttgctgaactatccgagtcaggatatttagagcgcaaatcaggaaaaggtacttttgttgctgaaaaaaaacttgagcgtggcataacaaacggtgttttaggtttttctgaaatgtgtaaaatgatgaatgcaattccgggtgccaaaattataaagatcgcccttgaagagccatcagaaaaggatatacagaaaatgtcacttaataaagatgaaaaagttttagtattagaacgtgtacgttatgcaaatggcaaaccagtattgttagaattaaataaatttcctgaatccttttcctttttatttgaagaaaatttaactgatgcatctctgtatgatattttagaacaacacaatataattttagatcattcccgaaaaacactagatattgtatttgcagatactaaagaagctaaaacattaggaatttctaggggatacccacttttaagaatcaatagtatcatacacaatgcagacaacactattactaacctctgtcagcaactttgtataggagataagtttacatttataatttaaattagattgttaggtatttcaatgtatcttagaatttaagcaagtatacctatacaaggtttgagcatgagcccattattccagaagaataatggggctcatgctcaaacacggcgaacgtgtatatttacaatcttgaagtttcaatattgtactttttacaagaagatatcgcccatgcataccagatgatgcctcaatctgtgatacagttaaccgcagcataagcatgtgcgatttttttattcagctaataacattattgaatatctatttatcaactaatccaagttcaaccatgcttttcccagttgctataattgcttcttctgctgatcttggctgccagccaagcaatttttttgcttttgcattgctacaggctgtgttttggcctagaaatgtagctggcatacgcaaatccttcataaaaaatgccaaaaacttcacgataaaatttggcatttcttttatggagacttttttagctgcgccgcctaaagatctctgtaaaatcttcgcttcttctttatatgtgagattttcccctgtggtagcaataaatcgctgtcctacggcttctgaacgtatcattgctaacaaatgtaagtctgctacgtctcgcacatcaacgtaatcaaaaccaatttttaagaggaatggcatttttccagtaagcatggaacgaataatttgattggagtgagaaaagtccttgcctagtacaggtcccatcactgccactggattgacaactgaaaactccatattctctttctttgcaaattcccaagccgcgagttctgccatggtttttgaacgttgatacgcatcaatatcccccgacaagttcgtccaatcttcctctgtaaaaatgtcagggtgagatttatgtcctgaaagcactgcccccgaagcagaagttaggactacacgtttaacgccagctgctttagccaccttcatcacacgcaaagtaccatcaaccgccattttcaccattgcatctccatcgtcaggacgtatggctggtgttggcgatgctacatgaatgacgtaagtagcaccagttgcagcttccatccaattcatatcacttgttaaatctgtctgaatgaactctagatttgcaaaatcagttatacctccttgagctagcattgatttgacctcatccttacgtgataatgtgcgaagcgttgctcgaacgccatatccctgatttaaaagtttcaagattatgtgtacggctatgaaaccacttccccctgttactaataccaatccttttcccatcatagtttcccccttgaactaaagtttcacttgtaacttctgtgccattagtatatactatcatcaagtgggaatcaacccagaaatcatcatctgtgacagtaaaggaggtactgtaatggcagctactaatcacgcacaagccataaaaaaagatacgaaagattttatcacaacagcgttacttcaaatgttagcaaaagaaaagttgcaggcactgacagtttctcaaatttgtaaacgagcaggtgtaagtcgtatggctttttaccgcaactttaacggacttgaacaaattttgtatgaatattaccagccaaaaattggtgctatgtttgatacaattcgtgaaaatcctcaattctcagccaaatttgatagccaattaaaattttttaatacctttggtgatgatataatcttatccattgatcgtggatttgagccaattattcagcagattttcaaagaagaaatagagaaattttatttcaaagataatgatgaacattggacaactttcatgtcagccggtgtttacgccatttggcgaaaatggttgcttgatggacgacaaaaaccactgaaagagataatggactttttcaaacaatttgacatgataaaaggtaatgtttagagtatctcttaagcattttgaatattgaaaaactctttatttataaaccttatctcgtgacatcaatatcgctcgaaccataatacctgatagaaaaacccccgacatctgtcgagggtttcaattatagaggcgaaccgtatcacacaactttatatgatacagttcttcatatcagtagcaagtgtcctaacactctttaaaaatatatatgtactatagtattcctacatcccttaaacatttcttatttttttcattaaccaagccatgttttctcccaaatttctcatgttttttattccttcttcatctagtataacatcccctacatctttcccataaaccatattccaatacgttgaaccaactacaagaacttctttatttagcaagaagtgatttaatgcatcaactgctgtcattcctccacctcgacgcacagctacaacgcaagctccaactttatgttttaacatgcctgaattagttgcaacaatcacacctgcgcgttcaagaaaagctttcatcttagatgatatatcagcagaatatactggtgacccaaggattattccatctgcattaaccatcttgttaaaacattcattgaaaaaatcatctcttattatgcattgttttttctccttacaacaaaaacaccccatgcaaccttttattgttttacctgatagctctattaattctgtttcaattccttccttttctaattccttgaatacagttttaataaggatggatgtatttccatctttacgtgcactgccgtttatgcctataactttcatataaagccctccatatactctttatttatatagtttttcttactattagtgaagcaataaaactaatacctaaaacaacagctaaaaatataaatgccaaagggtagcttccactttctataatgcgattacatacaattggtcctactgttgctcctataaacaatacaaatgtatatagcgtcattgcatttccacttttcttcccagccaaagtccctattgatgaaacaaccattggcaatgatatggtaattccaaatacaaaaactacactcatcgcaactgatagacctacattatttgatataccaataattaaaacgcctattgaagcacacacaagccctaaagatagaatattacctactcctattttttttgataatttggcaaataccattgaacctatcattccaataataccaattcctctaatccataagattttttcattattaagaccaaagtctttttgaaaaaacattcccattacagtatacataccaacaaagcagaaaagcaaagtcaatgtaatcacgtaacatggaaaaagtgacttacttattaacaattttactaattcaccaatgaagcttgtaggtctctctgaaactttatctgttttgggcacaagaaatatcatggaaataataatcatcaaataaattaatgcttgcagccaaaatacaactgaccatgaatatgaattagctattatacttccatacaattgtcctaaaatacctgccataacaaatcctgtagtaatggcactaataccagctatacgtttagattccggaaacatcttaactataatagaaaagcctagtggtgcaaaagaagctgcaaatataccttgaatagcacggaaaactatcataagtttataatttgttgcaaatcctatcagaaatgttgagatcatcaataataaagttcccacaattaatagtttttttatttcaacataattagctaaccaaccaaaaattaggaagcctattgcataaaataacgaaaacacacttcctataaaaataatttgttcttgtcctacatgaaaactctgctgtaacacattggtgagcggaatccattcataaatacccgtacctacacagatacttgctataaagagaaatatcacctgtaatctgtaatgtattccttcacattctaatgattctttatttaacatattctctacctccttaagacttccttagtataaaccttagagttaactctaaagcaagctttttatttcttagttttaatgttaatataatattaattaagctagataaaacaactaattttaaggaggtatatcaaaaatgaaaggcggattcagtattaaagaagttgccaaattaactggcctaagtgagcatacattacgtttttatgaaaagcagcaattaattaaaaatatttcacgtgatgaaaatggatatagaatctattcggattttgatatagaatggatacattttttgattaaagttaaaaatacaggaatgcctttaaacgaattacaaaagtattcagaacttatggcacaaggaaatccaaccctcccagaaagagaaaaaatgcttttacaacatagaaaaagagtagaaaatgaaatttccgatttggaaatcaccttaactaaaattgatgaaaaattagatagatatcatcatttaatgcaagaattaaacttactatagctcttacctaattattcatatgcaaattacttaatccaattcttgattacatcagatataaattcagcagtcgtagttatcaatgcggggtcaattgtatccaatgtatctttaaatgtatgtgtatattctaaagcaccctcaaataaatcggatgatgtaacagctaaacaaggtataccttttaaagcaaatgcacagtggtctccagcataccattcatgaccattaactattttttcatatttcttcatactatcatttatgatttccctttgactttcatttatattataataggaaatcgcactttgtgaattgatatgacatggtgaatcaatatttattactaatagaattttgttctgattattattaagataattaacttctccacttgcaccaaaatactcctcactgttaaatggaacaaaatctatatcaattgggtatgtaaccttcttaaaacaattcattacattcattaaaacacaaatgccagcagcattatcaagtgcacccaaggtatcatatttagtatctatatgtgcacatactacaatttttccttttgaattggcaatttttttatttgctactaattgtctacttgttgccattttgttttcagaattaattaatagtaaaacaaatggactttctcctattaatttttttaattgtggcaacatatcaatactcatatatgcagagggaatagaaaaattcccatcctcaaacatagtaaaaggattcattccactaagcttactttttcctgtaatacatataatagctttgggtttcttagcttctattgatgaaataataaacttatcttcatctggataataaaacggaaaatttttaggttgtatgggtctttcagatacttcaccacataatacgataattttcccactcaaattttgattttgtaattcttttaaatattctataataactatctctcctatcccattaaaaggctttgaaaatggactaggattaatctctaattctatatcttcagattttattatagattttttatgtttccaaacaacacaatcaaatggtaaagatgtaacctcataacctgatttcataaattcttgttcaagataattcaatatctctttattagtttcagtccctactggtctctctcttgtaattaattttaataacttgatattgttcataatattctccttctaacaattattgtacaaaatatacctttatttaaactatacaacttaaaaatatggtggtgtacaattgtaatgttaatattatgattcttttaacttatcaaagattaacgggatttcttctgcagctgattctaatttttttagctcacttagccaacaatcacctacagataatagttctctctcatctgttttattaagcgcagctactactaattctgtttgtcctttatcataaaccataagacaacgatgaattgcagacatactataccctgtctgtcgcaacatataaattatcctaatcctatctaaatcaatattattaaaaagcactgcgtttctgtaacctcttttgtctgattttattaaatcattacgttcccaattacgaactgcttcactagtaacacccagcaaacaagctacttcgttacgcgtatagaatttttctatactatcactattatccgtatctcgttttaattctgcccacttatgtaataattgagctgttttttctgctatctctatttcattttgaataattttaatataatcctgtgcatattgttttccttctattaatttactttctgccgaacagataattataagttttcccgtatctcttatatgacgattggtatatctatatcctaagatatgtctacatattgttaactgtaaaatatgtttatctgtaaattcacgataaccattaggtttacgactggcttttgaaatatacccaatactttcataaaatctaatagtattagaatgaagattaaacatttttgctaactctattggcctataacttttcatattatatctcctttataataactatttaacacccttaaaatactaattattcattcaaatattatgtgaacttatttttctatgactattacttatatttattttactacacattcgtaattataatatttttacatataaaaatagacttaaccaattataatcaatggttaagtctaaaaacctcattagcttatgatacagttcaccgtaacgttatagcatatacaacataaagttttaaatcttaaatttttctataagtgtctccaaagtctgagctaaattataaagctcatttgcttgtatttttacattctgtatgtcacttaattgattagctacactagcattaacttcttcagtggctgctgccgactcctcagacacagatgaaatattgtgtatattagaagtaagtcgattactattggctaccattagttctatattttcattcattgctgaaattttttctattatacttttaataaatttatttaaattcacaaagctttgctctgtaagagaaaccgctgaactttgattttctacattagatttaatattatccatatttactgcagcagttttagtagtatctacaaccctagtaattatatttcttatattttcagctgaggaaccagactgttcagcaagctttctaacctcttcagcaactactgcaaagccttttccagattctcctgctcttgcagcttctatagccgcatttaatgctaataggttagtttgagaggaaatatttaatattgtactcaatatttcaccaatatcttcagtttcctttactaaaactccaatactttcagcaatctgtgaaactccatttatagtgctttcattttttgtcttaagctctttaaatgcaatcattgtcttctcgctgctatgttccatctcctgactttctatgtttatcttgctattatattctttgatttttaataagctattattaaactcaattgagatttcagaggccttgtctgtttcagaagcttgttcttgaacacctcttgaaatttcatctataactcttgctatttctccagaagaagaggtaacttcatctgctcgtttagtaagattttcagaaaaactcaacacattatcagcagaatttttaactgatacaactagatttttaacgccatcaagcatattagaaaatcttcttcctaattctccaagttcatcagacctatctatatttgttacaactgtcaaatcaccagcttcaccttttttcattgcttcttgcaaatcattaattggatttgttaaatttttagcaatcttaaagccaacaaacaaagcagctataataaatataaggaataatccagtaagtattagaacattagaaagaattttagaatatacctcacttgtgtccatcattccaattagcttccaaccagattttttattgcttaagtaatatataaatttacttttgccaagaagcttagtttggatagaatttgtttttccatccattactggtttcatccatgacacttcagttttatccttaaaagcattatctatcttttgattttttgtatcagcattggtatttactctatcaggatttaggttcttctgtattaaatctttatttttagatgctataactacacctgttctgtccataagtagtatttcacctgttttttcaatcttagtattgctaaatagttcagctatattagttatatctacgtctattccagcaactcctattggttttcctgagtcgtctagtatcttttttgtagcagttactaccatcttacccgttgctatatctttataggcatcctgccaaagtaccttatcatcggaaattgtatttttataccaggacttcactgttggattatagccttctggaagagttgtttcaggaaatagatacatgcttttgtcttcagttgcaatataagcatttaatattttaggattacttttaattactccgtcaagctctttttttactacagttccattgggatttgacaatgcattctttgctatggagttttctgatagctgggataacactgcttcataactattataattctcatctataacattatttacacctgttacagacttttccattaggctattagaagagcctttaagggtattataaagtattgcatttgcaatgatacccgtagtacacataggaactaagattattagtataaatgctacaataagttttttcttgatagttttcatttgtttttgccccctaaatattattgcaattatattatcggggcaaattaccaaatctaaagataattatcagctaaagtcaattatgcttttaatttactgaaagttactatataagggtttttatctaaatgcttgatacaaaactctatcatcaatatgtttgctctcacagctcattttcctctcacttcatatttcttatcgtactgacctgcactggatggatatgtttattctatcttaatccataacttcatttctccgcatctttcttacatagctttttagccaagtaaacactgaaagcccctgaaaccaagggctttctattgtatcaatatttcagtttatgtatggtggagacgaagcatcttaaactcccctaaaaaagtctatctcttttgcggtacggttctccatatccgttataagagatgtctctttttattacacctctttcataaattatgcactagtccaataccctttaaaatcatatttccattttaaatttacctactatcacatacaactcttcagataactctgcttgattttgtgatgtttttgatacattaagtgctacttttgtagtgtcattaacaatattccctacagccgcaactttttctgaagatttttgttcattgagtgctacattttgagctgcttcacttatttggcctatagttgccgaaaattcttctaaggttgaagctagttcttcggataatttattaatataatttgcatccctatagtagtaatctcctcctttaacaaagccattaaattctggtatcactttttcatttataaacactaaaatatcattgctacctgcagaaatattaccaaaagcctcatcaattttacctatattttcattaatattatttacttcagtttttgattgttctgctaactttcttacctcatctgctacaactgcaaaccctttaccattttctcctgctcttgccgcttcaatagctgcatttaatgccagtaaatttgtttgatccgctatactttcaatagccgctgccatatcttttattttgttaacaatcttgccttcctcaatggctttaattattgtttctcttttttctttatataaactttctgtagtatctgcagcaatttttcccttctcctgaacattttcagcattgcctcttgcttcactggctacatttcttgccattaatgccctctgagtcaattcatttactgccgaatttatctcttcaatagatgcagttatttgttctgaagccgcactgttttcctctatagctaccttgatagttttacatgcagtattcatatcttccatttttgacacaagttcatttgatgttaatgataattcttcactatctgacttcaattcatctgaactatcacttatattttttaataaattaactacattgctttgcgcttcatttagtgatactgatgtttctccaaactcatctttacttgctatatttatgctacttgaaaaatcatattttgcatttcttccagcaaactgcttaattttctttaatgcatcattaatattttttattagcagatatgaaaatataacacttaccccaatagcaactatggtaagcataattgtaataaagagagccttcttatattgtttttggctatcttcatattttgattttgcaaccttttgattatatgttatttcttcatcaagtaaatcatttatcttagctctataaccatcaaaaatagagaattgatttttaatagcattataatctccagttcttgctgtttcaaaaaatttatccttagcattattgtaaccattaagattctctaaatattgagtaaatatctttttatccttttcatcattaattagtgattcatatttttgtgtaagttcattatccttttctattaaaccgttcatatctgaaatagttttatccacaatggattttctatctggattaactaaaataagtgatcctgaagttaaatcagccatatgagctctgatatcttttgttattgacaatttcatcaaactttcggagtatattgtatttatgttatcattaacttgcgtcatcttttcataactcataattccattcataattataactgtaattattattccaaaacacaaaatcaacttatgaaccaccttcaaatttttaaacaatcttatcaaatttattgccccctcatatgtattttgttataaaaaaatcctattgtatactaaagataaagtcgtttatgcttattctacaatatacaataggttttttacttatattgatatatcgatatttccttatggtactttaattactaattagttcaaatcttttattattattattattaaactttcaatagtagttattatttataaccaattaaataagagttttaccgtaactactgaaagttaagctttttactataattacaactaaagattctaatattaataaaggttctttattaacatatgcttaattatatattgttttttgttgtctatatacttatcattgaaatatacaatattcttaatttatgtttaaataggagaactgtactttatgaaaaatgttattaaattttatgaaaaaggttcaatagaaatattatatggcaaaagcagccactcttttccccttcatagtcatgagtgtttttgtgttggtgctattactaaaggttctgcgctatttacaataaataacaccaagtgcttattagaagaatctatggtttttattattccaccgaatactggaatttccataactgcaaactcccaatatgattacataacaatatgttttaaaaatgaattaaaaaaacaagtagaacatattctcttcaataaattttttcttaagataaagtctaatgatgaaatattcaatttatgtgatatttttaaagagaacaataatgaaaaacaacttttaaattccattcttatattaattaatagtactatagctactaattctctagtcatggagacttccacaaataacactgtattattaatttgtgagtatataaaacaaactgcagctaaaaattttagtttagacaccctagcggaatctttttacttatcaaaatatcacttaatccgaatgttcaaaaaggaaatgggtgtaaccccttatcaatattatattcaagcaaaaatggggattatacgaagacaaatctttaatggtaaatctgaaactgatttagctattaatttgaatttatcagattcaagccacttatgtaaaatattcaaaaggcagatgggcatatccattcaagcttataaaaagaacctaataagaaagtgagcaatattttacaattatttttttttgcagtatgctaccatataattaaaaatatatttatttaaagtacatattagaaaaggtggttataaacatgaaagttaaagcagcatttatttttgtagcaccagaggtcgattataaaattcataaaactgttattgatactcctgttgtacatttaactgtaattggcgtaaaaaattacaatgaagctgtacctattgcaaaggaattggtaaatcaaggtgttaaagctatagagctttgtgctggatttggaaatgaaggaatagcacttgttagtaaagcggtaaaaggtaaagcatcagttggtgcagttaaatttgatcatcaccctggatttgattttaaaagtggtgatgatctatttaacaattaaagttacttatataatctaaattcatattcacttatgataaagtatttcacctaatcgagtaggagctaaataattattttatttagcgtcctctcacaccactgtgcgtaacgttcggtacacagcggttcaatagaaattaatgtacttgcttatatcttttaaaaatacttgtataacctatcttttcaagataggaatttgtaagtgttgttgaaagtatggggctattggctattcgccaatagcttttccttgtatttgcaaattcccatgctttactattattaattccaaactttcttagattatcatatttggtcttaaccttcttccactgtttccaatagcacattctaagccttcgtctagtccactcatctagcttctttgctaatttagtcatctcagctattccaaaatagttgagccatcctattatacattgacgaagttttattattctgttttctatatttaaagcattgcttctggcagtaattgctttaattttagctttaaactttttcacagatttttcatgtactcttattcctatctttccataccattgataaaatgtgaaccctaaaaattttcttctccaaggtctatcaactgcacttttctctttgttaactttgagctttaatttattttcaataaatctagttatgcttcgcataactctgtctcctgcctttttacttctaacataaacattattatcatcagcatagcgacaaaatttatgtcctcttttttcaagctctcggtcaagttctgtaagcataatattactaagtaatggactcaagggtcctccttgtggacatcctctttcggtttcagaaactactccatttatcattacaccactttgcaaatataaccttattaactttaatactcttttatccttaatttttctagcaactaatgccattaatttatcgtgatttacagtatcaaaatatttcgcaaggtctatatctacaacccacttataaccttcttccatatattcttttgctttctttatagcttgttttgcactccttttgggtctaaaaccatagctattttcagaaaatgttttttcaaatataggtgttaacacttgagatattgcttgttgaatagttctatcaactacagttggtattccaagtaatcttattccaccatcaggttttggtatttccactcgcctaacagctttgggacaatacttcccattaaatatacttgctattagagtcttaccattttgttttaggtattgtagaagttcatctactttcattccatccactccgtggcttcctttgttggatttaactcttttataggcaagattcatgttttgcctatcaagtatcctttctagcaagttagtttcatataactttccatcgtcttttcttctatcaaatgccgtagaaatactatgcgctctcgtgctattttgaagttccactcttatttcacacgaccagccctctttatatgaagttgtctgcaatttttgcatttctttcgaatttttcaagtttccaagacctcctattgttcagtccttcccagttcattcatgactgaactggtactatgacttctgctgacttctgatagttcagctacatatcactatgtaggttatcatacagaaatttcattctttgatgatttatctatcagacctccccaggtaagaacgacaaccttcctctcatatatctgccacatttactttctaggaattcggatagtgttggactttgttttgttatgcaaactcgtcctacctagataagccttgtatgtgattcgtatacctcagaccgagaatttgcctagtacttccttcagattcctcctcacgaaggacacccttgccttcggctagtggttcccactatcaagcccacagcggactttcaccgccaagttgtcgcccatgctgggcgcacaaaaatgagggatcaccttcacaatctggtgatccctcattcttaataatatatattcttcatgatatggctctcatattactgcatcagttaattctttaaaataattatttaaacttttttaattaaaatgtatcgttacatgtttctaacaagcacagttccacctgtactaatgtaagtttcataatcttcacctgtaatcaacttaaaaaatatcctagcaatcacttggtctaggtgcaaaagggccaagaccaatggaacaaagccaattcagtactacctcatgcagcacattgatgttgtctacctgacagtgttctaatccgccaattcttctatcctctatagggaaaaacgtcttgtttttcgaaccggcctgttcgtaatttttaagagcttgcgttagcggattgggctgaactaatatctcttctgcaccatgcatcacaagaagagggcattctatctggtgaagcacaccctcgagattgtaggcaaaacgaggattttctgcaaagtcatccaagctttttgcacctaggattctcatgccgtgaccagccaaactcggtggcatccattttagcattgcttcccagtcgaatgcgtgggtacctccgtcagagatgacggcagcaatcctgtggtcgaaggaagcaaatctaagtgagtcgtatgccgcaaagctctcaccgtggacaataatcttgttaggatccacttccggtctagttagaagaaaatcgattgctcttgaatgaaaagcctcgctgtcagctctcctgccctttcccttttcgtacattgaaagaccagttccaggctgatcatagaccataaagttatatccacaggaaataaaggcaggtcctaaccagaaatagttctcaattgaccattcatcaccaccattgagagccaaaattgtgggcttcggaccttttatccaagaaggtgagaaaaagtacccatccaacttgacatcctcataatctacttggattttctctggtttgacatcaaagtattttccggcagcttcgaagagttcatttaccttcctaaatatacggattttctcgttgtcatcatccatcacagtatattcagcaattctgttgtaattgcaagcacgaatatagcagttacgtgctgtataccagtttccaactgcttctgcctcctttccatgcctttccaaagtctctgctgttatgagccattccctatgccatgtttccttatcatttggatctatttttttgcatgcttcataaatttcggtaacgtcagtagcaccaagacttgccaagcctagagctttagttacttgatatgacatcatatagttgtttggccaacggctgaattcaattgacattgcagtatcctccttctctagttatattgattactcccgtccatctctgattaagtacaagggtacatgttttgaaataatagcacctatctatgccggttttgccagcttgattctctaacatatcatttcctcctatcaatttacttgcatttttttaagttacaagtaaattctatgatataaaaataaagccgtcctaaaagtaaaataaatctttataaaaagaatataaaagattgtaaagcactaaaaaataaaaaggccactgcctgtgttccatactttcaatcagcagtgatctttaatttattgtagaaaaataaaattagtgttttgcaagtgggaggctgaactttatgcccagaccgccatactcagaagaatatgcataaatttctccaccatgatattcaataatcgatttacagcttgcaagtccaagtcctatcccaccattttcaatttgcctagatttatccacagtgaaaaatttaagaaatagtgaagatatatctttatctggcactccaatcccattatcctcaatttcaaaataggcataagacccttgtgagtatccagtcatatacactttcaactcattttttcctccatatcttacaacattactaaagagattaccaaagacccgacctatcataatttcattgaccataagcatcatatttcccgtgaataaatgtttgtaaacaagctcacagtcaagtcccgatagctcatgctcatattctagggcaatgttttcaaataattttgatgcatcaacgggtttcactgtcatagattctaaatccagtttctctttggtgaagcttaaaaagtcattgataagctcagccatatattttgactttttttgaatcaactcataatattcctgcttttcattttctgatagacccttttgcatagctaacagttcagcaaaaccattaatagatgttaatggtgcttttagatcgtgagcaatagcagcaatcatatctgtttgctctttgtgtgctagttggagcctcttttccatattgttaaagtgattataaaggtctccaatttcatcattactccttagagcaagtgaaggcaatggatgcacgatatttattctttccaatctggtattaagcagtccgattggtttttctataaaaaaataaatatacataatcaaaataacaaagatgaaacaggcaatagcaaatataggaaagagtaatcctatacttgatgaatttagtaatgaacctgatataggtgaatataatgcaaagataaactttaaatagattccaattgaaaccataaaaactataaacatcaccaggaacaataaaggaagttttattctcagtttcatactattactctctttccttgtacttatatccaatgccccaaattgttttaataaagtcatattcagggccaagtttcttacggatattttttatatgaaccgttacggtatttaattctccgtattcgtctccccatacatgttcatatatctgctcacgagtcaatacattattggggttatgcacgagcatggacaatatttgaaattcttttgttgataaattaagctttctgttatttagaaatgcttcaaaggtcttatcattcaagatgagaggagaatcatttctttctctattaggactaagttcattccactctttaaagagcctgtcaatttttctgaagttggctcttatcctggaagtaagctcctgaatgctaaagggctttgccatgtaatcatctgcccctatttcgagcccaacgattttatcgatatccttatcccgggcgcttaaaaacagaattggaacattataagattttctgatgcttcggcagacatcaagaccatccataccaggcatcattatatcaagaatgatgaaatcaatgtgattttctttcaatgcacataaggcttctttcccagaatatgctgaaatcatttcaaatccctcatagcttaaactctttgttataagttttactatatctctatcatcatctacaactaatatctttttttgcacttctcacctccgagctgcttcaataagctttctcttccacagtcaaagttatagcttagcttaactggagcctttagctttctcacatatatcaacctattttatgccctgtaattaggcttttccaaagagatttttgaagttttctgtaattttttcaccgtaaacatattctctaaaagctatgctttcatttatctctacaattaggaatctataatttaaattattaacctaagtaacaggcaatttttctataattagaacttacacaaaaatccacatcctatgctttatatataggaagcaaaatattatctatcatgtccttagcactctcttctgtgatcttaccatgctgtataatctcgttgataatcagcagcgacggtagatttaaagctttttgagaaatagtatttacagaaagtgaaacctcattgcgctgattagccctggttataatagtctcaatggatttactaatatcattttcattattgatactattaaataagtcataagatactgcattggaaaacatatctgaaatcaaatctcgcagatcctcaggttttataacctgaaaaattggatttaagcactcaaatagcgccattaagtcttctttcaatgaaccatgatctcctatatcaaagcttatggctggtgcctgcctgcttatagccgcaaaaataagataacatttttgtggccagcgccgataaatagcatttttattggtttttgcagcatgagctacatcatccatagtcaatttaccatatcccttttgttgaagcaataaccaagcctcatctaaaattgcattttccagcgtaacgcctcggcgtcgactaacattatcgttcactttgttttcctcctatttttggtcaacataattccaccataatatagtaccataaacaccaataaatactataatagaaattgtcattctgctgactaagctaattagctgaggattatttaaatatattccaggaatagaccatgggatatatgggcctacagactgtgatccaaaaacaacagccataattagagctacaaaagatatactaacgggcgcaagtacaccacgtaccatgctggcgatgagcgggaacaagaagcttagacctatattatatagtgttgccatgaccaatcgttttacaatgtttccagccaaagatacattgaaatctgctaaattaaaacaataccctagtgagaaagtcgccatgattgctatcacagttatacctacaaagctcaattctaaagccaaaaactttgcagtaactaaagttgtacgaggaattggcaaggataatagatctttataagtttgatcctgatattcccttccaaatacccaggtgcttaaaatactgaatcctataagaccaattacagttaaatacataaaaaaagtaccctttaaaaatgcttcccaggttttatcctgcatatgaatgaatattaaaaaagtataaaaggccaaaatatagattggtatacgacctcgcattattttataaagctctattttaatcattgaccatagctgtttcataagtatgcatctccttaattgttctaagaaagaattcttctaagctttcctttacaggctgaaaaatcataggatttaatttctgttgctctaattgatgcaataaagcagaatattggttaattggtacacctgaaacaagtatttccgactcacttactggagtacactgcaagtgttttgtatcaaggtaatcagtaaggtttttaacagactcctccacttttatatatagtttggattgcctgcatccttcaaattcaagaaaacttaattcccgcaacaggcgtccactagccagtattccgatacgattcaccagtttttccatctcatcgagtaaatgacttgaaataaaaatagtagtgccgtttttagccattcttaataaagattggcgtacagccacaagaccctctggatctagcccgtttgtcggctcgtctagcaaaagaatctttggtttatgaataagtgcctttgctaatccaactttttgattgtttcctaaagaaagatcttttaccttaacctgtcggtatgcatctaacaaaagctgctgtgatatgttatcaattcgtttcttaatttccgaattggggatgagtctttgctttgcatataatatgagattttcttcaaccgtaaagtttggatatgcatgtggtgtttcaatcaagtaccccacctgattccaaaactcagaaggaagctttgaaattgattgtcctgaataataaatttcgcctgatgtaggtcgaatcatttttagcagcatgcgcattgttgttgtctttccagcaccgtttaaccctaaaaagccgtatatttcaccttcgttagctgtcaggttaatattaaaagcactgtttttcgaaccataactctttgttaaatctttagtttgaatcattgacaaatgtaacacctcactctcatgctgttcatatagggtactctggtaccttatatgaacagtatagcaccagaatttcaaatatgcaacacgaatttattactttacggccaaaggaaacatcttctttatatttatgcatcactttatactggcacaaagtcagtgccactcgtaaaacttgtggcttgctttcgcccttttttcatgctttttttaacttacgcaaaaaggagtatcgcaagctactttaaaagtagttttgcgacaccctcttctatattgtaatatatatttatagtatctatctttttcaaaaaaatctatgtcatttatgataaggttctccgcaactatcttatcggcgtcagtttcaaagaataggtattttcttatattcttttcgatttaattccatgctaaaaaataatgaatcaacattatagctgattcattattaaatctatttttttctcatatttatctgaatatttatctttaagttgatacaatacatctattagtgaacttagttcttcatctcctagtctttttatcgcagaaatatatgcattattaaatggctcatagtttaatatcattctgttaatttgcataaagcaccttttagcattaataagtatcttatctacattgcataatatttcatatattccatcctctaatccacatctatttgctattgtaaaaatgcattgtattacattatccattgctgatggagttgatgttgaatcgtccaatacttgacatagttccttaattacactgttatccccatttaatgatatcctatatacagcctcatcaaatacgtctatatcatcatcttcccctaataatttcatctgctttaatattttaatatcatttgctatcgaatgcaagcgcatctctaggcattaaatttaagtaaagttcttttcctcttcctttaaatccataagtgaaagttcttctatgtctgcctcctactcctggacttaattgttctaaattgaatgctaaactatcatccatatcaatattaaatttttctttcatgtaataatttgacggcatatgatgacctgttaaattatcaaatggtatcttttctaattctccatattgtgcaaattctaactctttttttaataaagcatcgctagtttgagcaatcttactatttttctttgcaacgaaatcaggatacatttcttttaattcagattttgctaactcacctttatattttatataattaacataattatgtgcttcagggttacttaccacctcagcaatcccattttcttgagctttaaccactttaaaaacacttttaacttctttacctcctgcaacaattgctttaccaccaatttttacaccagttgccactgcaccaagtacatcaaaacaagtatttgcatatttgccactttcttcagcaaaagtttttccaaaagtttttgcgaaggtaactgaagcagtcccaacgtcacttaatgcgccttttactttaggcaataggctcttcacattttctacgcttgaaacagctatagattttgagaacgtacctactttacccagtaaactttctgccttgcttgccttactaaccgcaacaccaatatcttctccacctacaaatagacttgccaccgttgcagttgtttgtcctatcgcataagcatttccactgcgaacctgtttccaccaatttccaaggcttacaccaaattgtgctcttacttgaggatttgtcaagtttccaactatattaaaactcctaccagttgtcgccatcgaggcatgattgatagcactattaactccacccgcaatgagcacaactccaaaacctgttcccactcctgtcacaacaagggctgttcctgcacaaatttgcagtccatcccaaactagtccgataagcccctcttttttagctttctcctttgcctcctcagccattcgtttctggctagcagtatagttcttactaatactcttccaatcatcctgaaatgctttctgattattcggattttctgcataattggcattggctatgaaagcatccacaaaattcttgctcataacctggactataagaatatccacgtggaaccgaaagagtactctttaagagcgattttgtctgtacaatcaaatcttgaacttgattaaagcctgggtctttctgttcataggaattccagttttccttgagattgctcaccgtttttttcatagcgtccatctcttttgcaacattgaaaagacggttactgcctgcaccgcctagccagataatgtcctctgcttcatctgaaatagcttttaacttactgccaatagaagtaaaatcagagcggtgcgagctaagtttacgctcatgagcgtcaaaatcttctttaacaagcttgaaattctcgctactatccacttccaaataacctttaacatacttgccaagtgccatttcataattgttaagcagcaattggagggttttaatcaatgtcatatgtattcgctaatataggctttcattgaatcagctgcattaccttttatggcattagtttgggttaattgagtcagtgcctgagtcaattcatcaaggggttgcatccgatttttaattcctgctgcaatccggatggaaaggtcagtcagttgctcataatagagttcagagtcactcatcattttgcctccttatccataattttatcaacactcattatctcagttttatgttcgtcagtatcaatttccacttttctcccatatctctcctcctagaaacttgtaatgaccagagtttctgccttctccaacttttcaccatcataaaacattttagaatattcaatataagatggacttgtccctaaagttccaacttcactcttaaacaaagttatgtcctcactaattataatatttttatatataaattaaggtatgtgatatttaaatcatttacttattaacttaatttccaatttatatactctttactataattatatactttttactataattatattattttcaaggctgtttttcaataacttttaagtataatttaatttgttatttaactttattttaattatataaaataaatatatctttgtgtcaaaaatattatatataagattataccctccaaaatctgaacctactttactttcagttcttttaatcatttcttctggttttaacaatatcatttttattaactactagcttaaatctatataataattattataagcatatttttatatttacaggatttatcattaaccttcttcttaaaataaaagaaggagaacctccttcgtctggacttgcttctcctccattagatacattattaaattatcattgatgttaagctctattgattctatatccctaactttatttatagttatttttgatattaacatatgcagtagtcttttttgttgttctcttgtcgttagcttagataccctcttatgaaaacttcaaggtatgctctttacaaactcatatgaagcttcttgtacaccaccctccaaaatattgacttttagctaatttgcatctttacttaataatcctactgcttatgcttttacctttactttctatagtaacctttaatttattgtgttgtaatttcgatgtataatttaatagttctttgtgggctactggtatcacttacctcttcgtaagaatggaggtgatacatatgagtaacgatactttaatgttactatttcaggcaggattatttttaatagcactattaacatttatagtgttacttatagaaaaaattttaaatttcaaagataatttttagatttaaagttttacaatatctaaaggtgtaaatagcacttacttatgatacggttctccgtacaatatataccgtagacttttactaatttaccattactttaaaagcttatacttaccttgacttagcattattaaaccattcgattgttgctttctccatatctttcggaagtatcttattatatacctcattatataaccatgcaagggtcttatttcttaggtattttctcatttcatcttctgcctctaccattacaacttttattaaacaaggacatttggtatgtgtatctggtaaattattcttatctaataatatattattttgtctaatttctgcacattgaaaaaatgattcacttccctctaatgcttcaacaacatcccaaaatgttatctcttcggcactacgagctaatgcataaccaccttttacacctggtatagattttattatccccgacttacttaattttgcatatacttttgataaataagtttctgatatgccttgaaatgttgctaaatcccttattcccacagatttaccttcttctgcgtttaccatatataataagcaatgtaatgcatattcaactccaactgaaaatttcattttattcatgctcctttaatatattatagtcttttattaatgatagcctattattaattctcattcaagatacttatatagcatcaaataaatacttttttacaaaatattttattgacaaaaataaaaaaacatcatattataattatagacaatctgtatcgacgattaaatttatccataattcgaggaggaatataaaatgtttacagaaaaattttttgaggtattaaatcatgaaggagtagtttctattgtaacttgttcaaataatgaagctcatgtctctaatacatggaacagctatttagttattgtagaaggaaataaaattctaattcctgccgctgctatgcttaagacagaggataatgtaaatgctaatcctaaagttaagttaacgatcggtagtaaagaagtaatgggcaataactatatgggaactggatttttacttgaaggaactgctaagtttttgaaagatggagatcactttaagatgatgagagaaaaatactcattcctaacaagagtattagaagttacagttacttcttgtaagcaaacactttaatcaaaggagaaaactatgcctagaagaattaataaattagattgtgttgggtgtggaacttgccaaagagtatgtattgttgggtgtataacacaagaaaaagatagaaaaagattaatcaatgaatctgcatgcgttgactgtggagcttgccaatacgcttgccctaagaaatgcatatccgaacattaacttaaaaaggtagattagatatagagttaacagaaaaaataatatctcctaagagatgtttttattcaataaaaaaatagtgctatccttactatctaaagtacttattgtttcaactagaaattaaattttctgaaatagtttttaagtactaaagtttgttagaaaagtttataactctactcctaacaattgcaaaaaataaataattaaattaagttgaaggagatgacgcaacacttttatataaatagtttgtgcatctcctctttgatatcgtaaaataatctatttcaaccattatgcttttcattcttcattccaagttttgcttatttgttatgctattttcgtatgaatacccattacactctaagggtcttatacgactttaaagattatttttccttataaagctagtcatactaagggttacaaaaaaagcctacgttacttgtgatacggttctccgtaacagtagcaagtgataaccttttataatttaatatcaataaaatttcattttgttattattagttatcactttttcgatgctattatcatatataattttattaatcttagtaacatccttacttgaaattctttctatataatacttttcttcatggtttttatttattccaacagtcattactatatcaggggatattgacataatgtgtactagctttccatctacattattacaaataaaactgggattgtcacttgtgataaatttattattaccagtagcaatgtaaaactttatagacattattttgatatacattttagccatataatatataataccagtatcatttaaaaactcacgatatttcctaagtaaaatggaatgttccatttcttgtgatgcggtagttaaataatttttttgtctctcttcaacaggaatgttaatcttgtccaatccaataatatctgaaatccacttatataccgatttaaatgcattattcgtatgaaatccacgccaattaaaagctatcaatgactttattattaatcctttataaaattcgtcaattttatctccttggctattcaatattcaatgttttcacgaacaatattccatttatcctcatatttttcagaccatagttgttctatatctaatattttcactttatctattttagctcttaatatatttttattttttcgtgaaatatctatgttattgctcttaataacccattcagcaaatttacaataatacttattatattccataagattagttaaaagtcgcccttcatagtaaatctcatatccatctaaacatttataaattttcttcaaatcttcctcttcacatataggcattccagctacaatagaatgaaattgagtaataccaaaattttttttgatatttttgccttcaaaaattctattcttagtatcaaatacataaatactatctttgttataacaccatgccttcaaatatgttcgtggaatcaaatggtggtatttttgattagtcatattgtcctcccttatgccttatattatataaacctacatatgttcctaacaaaatgatgttttccatatatagtcctcaacaaacaatactttctaacacactatagcgtttctatatcttttatgtagcttactcctacattaattacttcttcactatcaagtaaaatacatatactatcatcttcttctaaatctttacctaactctatgaatgatagtttcccaataaatatattgccattgctgtcagtaaccttaatacggtctcctaactcaatatacatatcaactccactcatattaccttcttttgtaacttttatacacggaataatatttgtaagtaccatcattatctctcccctacgttttatattattaccaaattatatcataattctattatttagtttagatgtttatttttatattcacagcatttatcatcaaccttcttcttaaaataaaatcataactacccgtaaaacgggtagtttgctctagccctataatggcatgttactggcagtgctactcgcacactgaacggtctgccaaccgcatgcctttacaggctgcacctaaaaggtgcttattttttgcctttttttactgtctcacccgtaaacgggtcaatatactctttcaaacttatctgttcatatgccaaatcttcttgtatctgattttttatatattcttctatgacctttttgttccttcctacagtatcaacatagtatcctttacaccaaaattgcctattaccatatttatattttaaatttgcatgtctatcaaaaatcatcagtgaacttttcccttttaaatatcccataaactgtgacacacttaatttaggtggtatgcttacaatcatatgtatatgatctttacatgcattagcctcaataatttctacacctttttgctcacataattttctcaatattattcctatatcagcttttatctttccatatattatttgtcttctatactttggtgcaaatactatatgatatttacaattccacttgctatgtgctaaactactattgtccactttggacacacctccaatatattttagttgtggttggcaaacccacttctattttatattggagtttttcttttttctactcatagctataagctttccggaaccacaggtaaaacctgtggtattctagatacaagaaggagaaccgcctccatctggacttggttctcccccattatttaagtacattattaaattatcatttatgttaagctctattgattctatatccctaactttatttatagttatttttgatattaacatatgcaatagtcttttttgttgttcccttgtcgttagctcggataacatcttatcaaaacttgaaagtatgctctttacaaactcatatgaaacctcttgtacactatcatccaagatattaccttttaggtcatttgtctcttgctgtaacatttcttctctagtttttatatcttccattctctccgaaaaatcttttttattgattattgaatcctcataggcttcaaatattttttcttcttaacttctatcttttctaactctttctagtttctcctttgatggttctaccatagcttttctagttgaatttatatttgctactatatctttaatgagcttatcattatttaaaaactttgataacttcttaaacacatagtcattagctttattgacattgattgaattgctatgacaaactgctgtaccttatatatcctccttaaatacaaaataggtttctatatatactttatcaatattttatatgaaacctactttataatatatatttatttttatcttctattcagtcttctcctttgtagggttaaccatatatttctaaattctctaaccacattttcatctacacccattatttcaactaatattatttcatcaatttcatccactattcccagtatgttatcattactcctaatatatccatctattctgttaagtaaattacttactgttgcatcatcaattaattctctatttcttaaatctggcataataattcttccaacttctcttggtaatatttctaatacccctccaccataactcctcccctcaatttcagtgaatgctaatgcaatactattataataagaaagaagaattctttccctatcatcatgattattaaatctaaccctatgcattgtatctgtactaacagcattaacttcttgactattcaatacaaatttaggatacaagtgatttctccttaagaaaaatgcatctggaacccaaatcgatggaactttataccacctatcccttatcctgcatttatatcctgaatttttatcattatgtatcccatactcaatatactgtttatatgacaactgatactcatcatatggtacgtcagggaaatctattagatatgtttttgctccattttcaatattacttttccaatcttcataagtaaattttactccgttaatattaacgctcctagcaattaatggtctacatactctttctaaatcatattcttctacaactctcctattcacacagaagtaatcattatttccagtagtaattccaacttcaactcttgccacatcactaaatcttacaaatttatcgttttctctaatattattaattaatcttatatcatttgctgatagaaaatatttagtccatttagattcatttatttctacatcattaaatggatattcatctaaatcattactttctgttaattcatttatatcttgatattctacaattctaagttgatgctctcgtgtatgcaatatctctttttctactaacaataaaactacttcttgttgaacattaggaaatactaactctctaaacgttacaatagtaatgcgctgaaatgttctcataataaatcttcttaaatcttctgcataagctacttgaagtaattctgctggaataaccagccccattttcccattgccatctaatatttctgcacaagctaccacaaaggaaacccatgcattaattaacttattaggtctcatattattccttattaaaatcttgctttgttcttctctttgttgctccgataaatactgatatctaatatatggtgggtttccaactatagcctgaaatctttgcccttgtaattcttgttcgtacactttataaaaatcatcatttattattactataccgttattaactatatctccatcatttcttaacgctctttgataatcataacaattattaaatcttaggctattatcaatttgcatacttgcttcgaatgatacatcttcatctatttctattgctgtaatattacgaccatcttctagtcttctctcacctaaacattctagaaatacaccatttccacaactaggttctagaattttattaatattattatcctgtattacccaatctataatataacttgctaaatcttttggtgtaaaatatcttcctgtcaatctctcctctgttgcatctttccttaataacattttttatcaccttttcttttaagataagtttcttaaatctatattattttatcatatttaataaaatttttatattttttaaaataataaaggatatcaaatcatgtgatatcctttatcatttaataatttctacaaattatatatatctgttaccaatgcctcagcattattaactaaatacttcttttcatctaacaatacttgccttgatgcctttgataaattactttttaaagacttattaatttcatgaattcttttaacatttgttacaatatcattatataatttaatctgatattcatcattaaaattaatattctttaatggaaatctttctaaaatatttgttcctcttgaataaaaatcattttcaaaatcactgccaattatggataacaacttttcagcaaacggatgagttaaatatgcttgaataaattctaattgatagttacttttctctttctcagatattgcacaatatccagcagtcccccctgatgcaattacaaaatcattgtcatcatataaatacattgcttttttacttaaaacaccaacaataagttttactttattattaaatgctgttaatgcttggtctcttccgtattgataccatgtttcttccgttgcaagcggaacatctcttcgcttaccgccaatttgttttggctccaactctaaataattatccattaaatagcgtaaagtattaggatattcagtttccattgtattcaagtcatataattttccttcatgattatatggaaaaattataaatttattagtatcaaatatatcataactacctagattcttttctttctttaatactggcttaaaatatttctttaatatatttttttctattatatattgtttatcttttttcttaatcttaaaatataactcagattcttctaatatttctttgtcactaaaccaataaattggaggtctttcagcacttgtctgtataccattaaataattcaacttcttttcccatttttactgaatttctatacattttttttactaagctcatatcatctttattagctactaatgcccatggaagatttcctagtacactactttcaacttttactttttttgattctaaattagaaaaccatttagagatattatctacttcaataaatttaaactccctttgtcttgcttttttaagaattaatattgaactatatatagttttatttctatacttaaataattgtaatgaaccaaaatcaatgtattcttctacgtattcattctttgaaagcatctctcttaatgattctccggatttaattttagaaaatttattaggtattatacaacctataattccatttgcttttactttttctatcgctctttctacaaatataaagtatttatcaaattgtcctttagatgtattgtatttactcttatatgcttttacttcttttttatttaatagatttatcatatcttctgtagaaacatatggtggatttcccaatattacatcaaataattcaccattatttatgttttcccaatcgaatggtactatctcatttttatctaactgagttaatttagaataacttattttcccgaaatcaatcaatgaatttccataccttatattatttcctaaatcaggcagaattttttgtttatcccttaatgaaggctctgtttctgattcaagcaattttaatattaaattaaattttgcaacttcaacagcatgaacatctatatctattccccaaatacatttttctagtatctcttttttttcatcgaatgataatttataattaccatttccaatgctcattaaatgttttatatcattttttatataccactctgttatatattttattatccaatcatatacttctattaaaaatattccagaaccgcaagcaatatcagctattctaagtttaagtatctcactaggttttttatttctacaacattcttctaatactctatttacaatatactttactatttctagtggtgttgtaaccacatctctatgtaagcttttgtcttttttttgtaatactacttgtccatcctgaatcactaattgttcagctaaaaacaattcatatatctcacctaatatattaggttgaataaaattaaatgcataaggacttttaggataatataactcttcaatagtatttcttattacatcattattcaaatcaaataatatattttcatctctaaacaatcttgaattatactttttatctgcctctctaaaaagcttatccatttctttaataaattctttttcttccaatatttctttaagcttatggtaagttggaagccttctatcttcacatattctcaaaaatataatctgatttataaattcttgtacataatcatttattatttctatttcatatcctcttgttttatataataaatttcctatacttaatctccatctatttatactatttaaaaaatattcatctactggcaattgtaatcctttatcatatacttgaagtccatatgtatctaatataaattcaaaagtaccattataaacagattcctttgaaattaattcataaatttcttttatattattaacatattccttataattataaatctttattgccgcaacattagaatcatcaccctctttaggcggtatgcttgtatcatatataattaaatattcaaaattagttaaaactgatattcttaaatttgaattccaaccatagcttcttgcctgaatagaagatttactatgcttttctacttcaacagaaggttttttagcttcaacatgaaacttttgaattccatttaaagtcatcgtatagtctggtcttccagtttcagcttgataattttcagttattacttctctatactgcggagatttacattgttcattactaatatcccaacctaatattttgaaaaattcatctataaattcaagcctacaattattctcattatacttattagcatccttatagtacacataatccttttcaaatttgtcaaccaattttttcaaagctattttaatatcattcattataacccctccataaatagattataaatgaattctattaaaattaacactgtaaatattttattattatataagattactcattccaaatatagttaaaacctcatttacttatggtacggttcacccctactaatcctaaaagctctataaacctgctccaaaagcataaccctaaaaagctgatgtggaaaagtcatctttgaaaaacacagcttataattagctctagctaaaactgcatctgaaagcccaagagaacctcctataacaaaatcaatactgctatttcctcttactcctaagtcatcaataaaagcagagaactcttctgaagaaaacatctttccttttaaatccattgaaactacatatgagttatcttttatagaagaaagtattttctccccctctttttctttaataagcttttcttcctttagggatgctttctctggagttttttcgtcttgaagctcaattatgtttagtttgcaatacttttgaagcctctttgcatattcatttactgcatcctttaaatacttttctttaagttttccaacagttataagtgttatattcatttttagctccttaatttgtatgcccaaaaagtgatagaccgcttaatctatcactttttgaatatgttcttattaatatagttttatgtactagttttttccacaacaattcttatatttctttccgcttccacatggacatgggtcatttcttcccactttatttttatttacatatgtttttgagttcttccagttgtccctaatttcttttctcttttcctttgagaagattccttcccactgaggaagatcatataaatattcagcctttgcttctaacatattaaaatataatttctcatagtcaatttcgaattttatatctgaagttacctctaatttttcaagatctaaaggttcttttatactttcatttattccatcaagaaatcccataaaaaatattgaatcagatccatattcagaagctaggttctcaatagttccttcaactactttcttatgacttgcaagaagctttttataaatatttccttcaacttcgccgtagtccttccagaaagctgcttctcctttatgttttacataatctacaactctatctgtccaatctttgtataaactcataattaattctccttttgacttaatattaatcttattataataacaatcccaaaccttttcaatttacatacaaaccaaaatttatcactttttacttatttctggttatttggtcagcttttttaaatatcttacacacttcgtattgataggtttgaatacgtcctattttccattgaaaacgctaatatatataactaatgaaataataacatccttatttataaaatctttggactataaaataaccctagggacttttataaatgacaatgtgtaaatattcctaaattacatatcacgtatatttattactattttttatggtaaatagcaataaatattaaagaactataattaaaactcgatataattactaggcatatcacgcttagccatgctaatagaaatatctccatctatttctatcccgttttgaactaattcattaacaactgtcttgtatgctaattcaggataattattggttctacttaaatgtcctaagataatttttttcttgcccttttttgctatatcaactatagctttaccgcaatcctcatttgataaatgaccaacctcacttaaaattcttctttttaaggggtatggatacggtccaaatttcaacatttctacatcgtgattactctcgagaagaatcacatccgcatcgcttattttacttttcacttcgtccgcaaagtgtcctaaatccgttgcaacacatgctgatttatttccacttaaaatcttatatccacatggtgatgcagcatcatggggtattttgtaattcaaaatattcatatcttttatttctatgtagtcttgagtaattatctttatattgtcatcttttatttttcctatgctgttcatcatggctttccaagtaagctcatttgcatatataggtatattatactttctagataatacaccaacaccttttatatgatccgaatgctcatgagttacaaaaatgccgtctatttcattaggatcttcttttatttcctttaaggctttctcgatggtctttcctgaaagtcctgcatctataagtacctttgaattatctgaagcaacaaatatactatttccgctacttccactgtaaagcgaacaaaatttcataattatcctcaaccttagacaatgattgtcccttatattttttctcttcttatatttgctccgagttctttaaacttatcctctatatgagggtatcctctatctatatgctctatgcatgatatttcacttacaccttcagccgctaatgcagcaattaccatagcagctcctgctcttaaatcagtagctttaacattagcacctgtaagtttttcaactccatctattatagcaactgttccttcaacctttatgttagctcccattttcttaagctcgtcaacatgtttaagcctgctttcccatatgctttcgttaactatacttctaccctgtgaaatagaaagtagtgtactcataggctgctgtgcatccgttggaaatcctggataaggaagagtttttatgttaactcctttaagattcttatgcgactctatagttacataatcatctccctcttttatgtcagctcccatttctattaattttgctgaaattgattctagatgctttggtataacatttttaatagttacacatccaccacaggctgctgttgctatcatatatgtagcagcttcaatttgatcaggtataacactataattacagcctttaagcttttcaactcctgctattcttataacatcagttcctgctccctttatatttgctcccatgctgttaagaaaatttgcaacatcaactatatggggttcttttgctgcattttcaagaacagtagttccctcagcaaaaacagatgcaagcatcaaattaatagtcgcaccaacgctcactacatcaaaatatatatttgtgcctataagcttatctgcttgagcctcaacggttccatgacttatttttacagttgctccaagagcttcaaaaccctttatatgctgatctataggtcttacccctataggacagcctcctggaagttccacctttgcttttccaaatctaccaagtaatgctcctataagataatatgacgctctcattttactaccatcttcagtatctgcatttacacttgtaagatttgtactatctatttcaacggtattttgtactctttttactttgcatcctaaactagttattattctttcaagacgttgaatgtcctgaatatctggtatgttatcaataacactgattccttcacttgccattattgctgctggaagtatggctactgcagcatttttagctcctccgatttcaacacttccaaaaagaggattgcctccattaacaactaacttgtccattacaatatccatccttattaatttttttatctatgtaaacttttcgttaaattctttacgcataatcacaaaatatattatatcatacttgaataatattttaaaacattatatatattttttattaaatttctatcatttaacattaataaaaaaggttaccttagtttttatgctctaaggcaaccttttatacaacatttaacaaacctataattgttttactattttttagccttccactttaaaacttccacaatctgtatgctctacttgctcagctctgttactgtgcttaacaacttttatttgttctaatgtacaataattatcatctttacagtgaaatctacattctgaaacagtacatcctatacttgaattatgatccataaaaaaatccctccctcgaattttattacagaattattattgcaaaaaatatagtttttattccgagcaaattattactatatatgttataataatatttagaaattttcttaaactattagttttattgtggaggatactgatgaaatattgtttaattgcttcatttacaaaagactcttacttaaatgttgaggatattcaaagaaatgcatgtaaaaagtacaaattgtataaaagaattccaaaccttcacgtttctcttcaaactctggatgaacctaatattgataagttagattcaattatacgtgaacagctctctatttacaaaaaattcaaggtacagataaataaatcacatttagcatataattcatcaagtaaaatggtatctttaaaagttgaaaacagaggttacataaatagaatagttagaagcaccaacgagaagcttcattatggcggcttcaaattctcaatgcctcataaagattccaatttattcattcctcttgcaaacggaaattatcaacttaaaaatatcctagaacaagaatctgcagctacctgcgaaactattccggaaaaggattattcattcttaaaaattgaaagctttgatttatgcaaattagttggtcatagaaaaatgtatgttgtaaaaaaatatcaacttagagatttttaaagttaatctttgagtaataatataaggcatataaacacaagaatatgatttagtatttttatgtttgtatgccttatacttcctaacaatccatgtaaaactttttattatttcaaaaagttttttattgtaatcgtttaagggtgcttttcttattttcaactttaatataaaataataaatatattagaagtaaaagaaaggcggctcattttcatgaatttaaataagctttttcatttacaaaaaaatttagatacaaaaataattgaccaaaaaaacttatctagtcaaaatttatattcgcaaaaggccctagcacttcaagtgaagtttggtgaactcgcaagcaaaactcgatgctttaactattggactacagaagctccttgcgaaaaaaatgcaattttagaggaatacataaattgtcttcattttattttaagtattggccttgataaagattacattgattttgctttacctagttcaagtttttctactaatatagttgaacagttcttagggctctttatagatataaatgattttgttatatgctcttcaaaggataactatgtaaccctttttcaagactttataaacttaggtaagaacttaggctttaatgattctgacattgaaaatagctatgtacaaaagaatgccattatagcgcaaatttaatattattatttactttttttgttaatacagaggggtttttctgcaagtcaaaagactttaccatgagttgcaggaaaatcgccgcttttttatttatatatacttaaatttactttcaacctctcctatatctttcgtagcataagtaatattttaacataaatgttactatatttcaatttcttttcaaaaacttcatgctttcttacataatcttcattttaatgattatcattcatttaatggcatataatactcccagcgtatttgctaattaccgtagacagcttattttgtcgcccttataatattattaacaaattgaaatgtggaggcaaactaatgaaaaaaaagggtattattatattaattttagcttcattaagtcttacttttagctcatgtactaacaattctacatccaaaaacacttctactaagtcaacaaaaatagaatacaacagctcaactgatcttccaaaacaaaaacctattacagcccattacctttcaaacaacacatcaacagtaaaagattttaaaaaagataataattattctgatttaacaaaactcattaataattatttgtccgtaggagccacgtttgattataaaactgcaaatgaaaacacactacttaaagttttagattattcaagtaatcgtataaaaaataatgcttcttcagagattgtaaaagaacaattagagcaagcaaaggcttcgaaaatatcaactaaatatgtaaaaactaatataaataatgttatatacgatagttatgataattcctattttatagactgtacatattatgaatttattaaaagctacttaggcgacttaccacaaaaaaatagatactaccaaaacaaaacatatctaactataattaaagaaaacggaaaatgggtcgtaaataattcggatggatattcaccagttagagcagaacaaaccgaaacaatgtatatgctagatttaaaacaatccaatagtgaatacatatcaaagaatcagttgaataggttcaaagatcttgaaagtgcgaaaaatactgttaaagaattttttaatgtatattactcacaaaactatatgaacgaaaacaatgtccaagataactttactaattttgcatcatcagcatttaaaactaaaatgatcgctattgctaataatgatattgaaatcactaaatccagactccttcaaacaaatttcttagatgttcagtataatctaattaattatagtagttacactaattcttattggattacggcagttccaaaatggcatttatctagtaaagataataatgatagaaattcaactataacctcctatgtaacattacatctaattaaagaaggcacttcctggaaaattgataaattaagatttttatcagataatctaagacttaactaattaagtaaaaggagcagaaatcatctgctccttttacacttttattaataatcaaacaccaatcttaaaaggtattatactatcagaaactttatttcgaccgcttctctttgctgcataaagagctgcatcagccctttctcgcaaatcttcaatctctggtgttatttccgggtaaattgataatccaactgataccgttatatttataaattcatcctcaccaataaaaaatttatgctctgctacttctttatttatcctacatgctatttgaaaggttttttctctagaacaattaaataacaatatacagaattcttcaccaccaactctagctaccaaatccctacctctaacatttttcattagaacctttgacagctctcttaaaataacatctcctattgcatgtccatatgtgtcatttattttcttaaaataatcgatatctatcataatacatgataaactttcattattttgcttaaccctttcacgggccgtggagaataccttatcaaattgccttacatttgaaagacctgtaagaaaatccttagtggaatctcttttataccttctataaagcttatttgaagttttgacgtaatctagaagcatatactgaagtatgcctgatactaatattattatagaatattgaacaagaacatcaataattccatccacctttcttaacatgtagtaatcagtaacattaatcataagtaaggtaaacaccattttataaaaccatctttttctctctgattttatttttctatcaactatatagaaaaatattatatatgataaaattcgaaaagcggctacaatagatgatacacttactccaaaatgaaatacacgatatagcataatcataattccagagattattgtcggcaatgttccagcagtataagaagctatcattacagcataagctctaagatctattaatgtatctgtgttcttaatatgctttgaatacattaataacaagattcctgcaaatccacagaaaacacctacaataacctttccccaaatagttctaaccttatccttaggtgtctcttttaaaatgctgccaccaataaacgtaaaagctataagcagtaatacatttataaaaaactcatttatcattttgtcaccccacaaaattcattaccactttatattttttttgcatatagtaattctcaacagcttcaaatatttttaattttcagcccgattattgcaatattattaatctgatgcaattatatcctatattattgctgttttcaactatatactcgctattggtaacattttcttgtatagcttgtattctaataaaaataaaaaatgagaagcctaactttaatagggcttctcatttttatttatcagttcatatccatgttatctactaaaatctgcgaatttgcggaaatttgctctaccgtagcagaaacctcttctaaggatgctgcttggttagttgctatctcccctaactcatttatagtatctattataaccttaatattattactcatctgatcaagtgcagataggattctccttgaagactctccactgttggatgctaactttctcatttcacctgctactacagaaaagccttttccaaactctccagcctttgaagactctattgctgcgtttagtccaagaagatttgattgttttgctatgcttccaataagtgctacagcctcattgctttctcctattagtttttttgtaacatcggtattttctattatgcggtttagcttctctgataacaaaactgcactattagtaatctctgatatggttaaatttgtttgttcaagtgatgatttcaattccagcgtagagtttttaacacttactgcattttccaaatccatagatacacttacaagaccaacgacctctttattttcattaattgctggaatcattgttactcttaaatcttcaccatgttcttccctattaaatatagttgtatacgtttttttcttattgaaaacaatatcgtacgcaccaacatttttaataaaatcaacatcaaatttatctccggccttagctgctaaagctttcttattgctatccaatgcatatacacatttatccctatcccaaattgtaacagctgcccttccaccaaatgcctctgctatagttggtgcagcatcaatcaatgattcaaaaattttttccatattaaaccctccctatgtacttaaatcaatacccataaatattatactataattaaaaatagctttctactctatttgattttaatataataattgaaaatactctatgtttttttatccttaaattgcacataataatagttagttaagaaagagaggtgtttatatgtcggaaaccatacacaaatcatcaaacagattaataaatgaaaaaagtccttatttactacagcatgcccacaatccggtaaattggtacagttggtctcctgaagctttttcaaaagcaaaatcagaagataagcctatatttctaagcataggctatagcacctgccattggtgccatgttatggaaagggaaagttttgaggacgatgatgttgcagaagttttaaatagaagctttgtttcaattaaggttgacagagaagaacgacctgatatagacgaaatttatatgaatgtatgcactgccattacaggaagcggtggatggcctttaacaatagtaatgactccagaacaaaagcctttttttgcaggaacttatattcccaaaaacaacagaatgggaatgcaaggcctgataagcctcttagaaaatattgaataccaatggaaagaaaaccaaaatgaacttgtagaaataggtgataaaatagtatccagcttaaataaagatcgtaaaactactgctaaagaactatcagaagaagttttagaagaagcattttctcagttcaaatataattttgatagaacttatggcggctttggttctgaacctaagtttccaactcctcacaacttaatttttttaatgagatatttttatgcttcaaaagacaaaacatcattgaatatggcgcttaaaaccttggacactatgtatagaggtggaatatatgatcatataggttatggtttcagcagatattcagtagataaaaagtggcttgtacctcactttgaaaaaatgctatacgataatgcccttctagcttatgcatacacggaagcatttaaaataactaaaaacgataactataaaaatattgtggatcaaatatttacctatatattgagagatatgacttcaaacgagggaggcttctactgtgctgaagatgctgactccgaaggtgtagaaggtaaattttatgtatggtctaaaaaagaaattaataatgttttaggagaagatgatggaaaaaaattctcaaaatacttcaacgtaacagacaccggaaactttgaaggagaaaatatactaaatctaattgaaaccgaaaagatagaatttgaagatgaatttttaaacagctgtagaaaaaaattatttgattacagagaaaaaaggatccatccatataaggatgataaaattttgacttcctggaatggtcttatgattgctgcacttgcctttggtggaagaagccttaaaaacgaaatatatattaatgcagccgaaaaagccgtaacctttatttttactaaattaatagatgctaatggaagacttctttcaagatatcgacatggagaggcctctataaaaggatatttaactgactactcttttttaatatggggattaatagaactatatgaagcaacttataaatcagaatatatagaaaaagctatcaagctaaataatgaccttataaaatacttttgggacgataaaaacaagggattgttcctttatggaagcgacagtgaggagcttatatcaaggccaaaagaaatctatgacggtgcaattccttctggaaactccgtatccgctttgaattttataagattatctagattaacaggcagttatgacttagaagataagtgtacagaaatactacaggcatttagtgaggaaatagaaagttatccaatgggctattctttttcactactttcagtgctattcttagggaaaaagtcaaaggaaataacacttgtttcaaattcctacgataatacctcaaaagaattccttgaagtaataaacgataagtataatcctctttcaacttttatttactatatagagggtgacaaaaccttagaaaacgtatctaactttgtttccgattatcaacccttaaatgacaaaccaacagtttatatatgtgaaaatttttcctgcaatgctcctgtgacaaatataagtgatttaaaaaaactactttagatataataaatttactcaccttaggtaaaaatatacttgaggtgatttttttatgattggtattatatcttctataatctctggtatttgcatgagtcttcaaggagttttcaatacaagacttagtgaaaaaattggattatgggaaacaaatgcatgggttcaaggcactgctcttttggttaccctcgtaatttgcttcatatatgggaatggtaatttaaaaatgattggaactgcaaataaactttatcttactggtggaatacttggtgctattattatctttacagttatgaaaggggtgtcctctttaggtcctacttgttctattagtataatattaattgcccaactactgtcagcagctataattgatttttttggattatttcatactgataggcttacctttgattcaacaaaaatcataggtgttgttcttatgcttgctggtataatttgttttaagataaaaggataatttaaagctaaacttattaaaactttaaataagtttagctcctttagtgttttaatggcatcccccgcatgaagcgcaatgccctgtacaattgccaccattttttccgtaaaactttcctttatataccctttctgaatcttcgcttccacactttggacacttagctttatcatcagaattacttactatttcaaaaaactgatttccacaacttttacatttataatctattaaaggcacttatacttctctccttccacttacttctatcataaataacacaagctatacaatagtttccctataattatatttcaatcagctcataaattcaaataaacaatgtcatttataagatttcttaatataatatactatagcactttattgaggaaataatatgttgtctttaaaaaataagctagacccaaatcttaaagctctacttgacgaaaatacctacaaatccataagagttataatacactgcaaaaaatttcaagatagaatggtatcaagattaaaatcctataaaagtaccgtattttattctataactcatgcaaattgtatatcagcagacatatcctcaaatgcaatcagaagactcgtagaatatcctgaggttgactatataactcttgatgatttttgctttatatgtgcatcaccttctaactcaagctatccatctagtttaagaaacaatactagtttttctggaaaaggtgtgtgcattggaattgttgacactggggtttatccacattatgacttaaaatatcctatgcctaggatagataatttcgtagacctgataaataatctagagtatccttacgatgataatggtcatggaacctttatcagtggcttgattgctggaagtggtgtaagttctaaaggcgaaataaaaggaattgcttataattcaaaactatatatgataaaagcttttgaaaaaaacggtagatcctatgcgtcttcgattctcaaagcattagaaattttgataaacgatagtagtgaacataatataaaaataatctgcttaccctttgaaaccttctttgaaaatgaatttttgttgtctttattttcaaaaatgtttaagttggcagcagataaaaatatagttattgttttaccaagtggaagcaatagaaatactaaaaactccatacgaggaatagctgctttaccttactctataactacatcaggcataaatacgcatgaaggctttaaagcttatacttactcttcctccggtccacttggtaaaattgaaaaacccgacttatgcggcccgtgcgtggatttaagttctcttaattgcgacataaaatatatatcccaaaggaacaatatgaaattatatcctagagaacttaaaaccccctacacaacttacaccggaacctcctgtgctgcagcatatataagctctatactagctctgcttcttgaaaaaaatccggacttatcctataaggatacaatttccattgtaaaaacttcctgtaatcttctcaaaatcccaaaatggcagcaaggttcaggcattatagatgtaaattctcttttaaattaaacatgtaatatttaaaattatacattataaaaattcctaataaagtatgtttaaccttagaattttttataaggcataatgtactataccttacatcatatacatgattcattttctttaatcagtgaattaattgaagctaatctgcacatattatttgtaaacaactttgcaatcaaatgatttaactagaaagatttttatgtaagacaatgtaatagtattgtacactctagttaattcatttgtctaaatattgtccccgaaaccttaaagatttcggggaccttatttatattatgatctaaatataacttcttctctgctaaacatatatcttgcaaaaacaagtgctgctaccatataaactatcatccatccgaaggtaattgctatatgagtgtaattgtgtatgcctactaaaaattcttttataaggcaggttgcatttgttattggtatattaaaataaaacatttctatatttttagggtctttcatcattactaggtatacaagaaccatagctatgatagttacaggacttaaataagtttgagcttccttaaatgatcttgcatagatgcttattgcaagttctatagcaccaaatgcaattgtactcataattggtagaatcattacaagtatcatagtctctgctcctaaattaaagccagttccattaccgaacattccattcttctgtttcatagtaatatacagtccaataagtgatgcaattgatattattattcctactatacttattgctaaaattttcccccatagtatagaaagtctacttgctttagttgtaagaagtggctcaagagttcctctttctttttctcctgctcctaaatcaacagacgaaccaattactcctgtagcactatagagcataagtaaaagtggtactaacatggtaaccataattgctcctgttccgttatccttttgagttgtatttaagttaacctttactggagttaatacttcaggatttatatttcttttagcaagtcttcccgcaacaattgactttgaatatttatctacatacgaattaacaatgtcatatgctgtcatagcatccgtgctagaattatcataagtcaaagtgattttagtattagcatccatctttaaatattcatcaaaatcctctggaatagttactgcaactaatatttttccgtccttcacatcactttttatattatttgacttaactatttttatattcttttgcttccttaagtaatttccaagagaactgtttcccttatccactatagcaattttcaaattttcctttacgcttttttcgctcttatttactacgctagacataaaaaacgatataagtggaagcagtagcataggtataagtatgctaaaaataattgtctttctatccctaaatatatccttaagttcctttttaaaaactatcattgtagtatttttcatttttttccctccaatcactttattaactctaaaaatacttcttccaaattattattattgtgtttctttttaagcgcctcaatactgccctcttctactatttttcctttgtgaattatgattactctatcacaaagtttttctacctcaggcatactgtgacttgaaaaaaccactgctttattttcatttttacaatgcaatataaaatcttgaactatccttgaagcactaacatctaatcctgtagttggctcatcaaaaagtactactgaaggattatgaacaattgatcttgcaattgaaaccttttgtttcatacctctagaaaacttaccaaccctcttatcaatgtactcttccatttgaagacttttagttaaattatctatactttttttagcctcttcatttgacattccatttaattctgcaaagtacattatattttctcttgctgtaagcctgtcataaattccaacctctcctccaaaaagaattcctatttcgcctcttaccttatcagattctttctgagcatcgtatccatttataattgcttttccatctgttattttaagcattgtagctaacattcttaaggtagttgtctttcctgctccattttcaccaagcaatccaactatttctccttctttaacttcaaagcttatattatcaacggccgttatatctttaaacctctttgtaagccctttaacttctaccatacacttgtcctccttgactttatttctatagctatattctacagtatctctattgattccttgtagtactttaggtaacttaaataattacttaagtcactttttatcttatatctgaaacttatattttattcagcttttaaaattcaatgtattacaaaaaaagagcacatatttttataaatacatgctctttaataaccttatttattagtattaagtcctttaattatagactttaaattatctgcacttttatttaatttctctacttcatctttacttagaggaatttcaagtttcttttctattccattagatgttattatgcatggtatacttaatgcaacatcatttataccatactctccctcaagtgttgatgaaacaggaaggatactctgttcatttaaaagcattgcctttacaagtctgcttacactcatcgcaatacctgcacttgtatatcctttaagcttgagaacttcaattcctgaatctctaacttccttatctacttcatctttatcaaccttataatggtctttaaaaatatcattcaattgattaaaaggaattccagcaatattaacatcgctccaagacgtaaatgaagaacccccgtgctctccaagaacatatccatgaacatttttactgtccacattatatttcttgcctataatttttctcatacgtgcagtatcaagaagtgtacctgtaccaataattttattcttaggataatcaaagttgttttgacaatagtaagtagcaatgtctacaggatttgttactacaattataattgcatccttagtatacttacatatatttttcattattgaatcagtaactttaacatttgtgtcagcaagaactagcctatctagcttatcatctggttttaaacttggacctgctgttataacaattatctgagcatccgcacaatcttcataatttcctgctcttacctttacgttaggactatatgcaaaagaagtggtatgactggcatcaagcgcttctcctttggctttgttatcatttatatctataattacaacttctgataaaagattaagtgaaagtacagaattcaaaactgctgatccaaccatacccgcaccaactactactagcttatttttaacaaaattcattgttttgcccccctttgtaactgatacatataattttagtataacgttgtacctaagtcaatattatttacttttagatagaaatgtgtaaaaatatataataagatttttaaaaagtaggtgataaaatgtctacaataaaagatgttgcaaaattatctggtgtctcaccaagtactgtatccataattttaaacggtaatgcatctaaaagaaatatatctgaaagaactcaaaggaaagttatggattccgttaaaaaattaaattatcaccctaatatcgcagcaagaaagcttagaagcaagaattctcaaagtaaacctacaatagcattatattggtcatcagatattagtgttaatataatatccagatttttaaggggacttcaaagtaaacttgcaaaacaaaattacaattataatgtagttatttgcccatataaaacagattgccttcatcttgaaaaagggataagcaaagaaaacagctttgatgctgcaatcattgccaatatatcaaattatgatttagaatatctgaataaagcttctttaactttgccaataatattgtttaatagattatctaataagtattcttcagtaaatgttgataattataaaatgggtgaaaaagcttctttattattcgctaagaagagatataaatctgcagccgctatacttacagaatctctaaatgatgcaatggataatagaaataagggttttatagaaacctgtcataaaaatggaattaaaatatctgaaaatcatataattgctgctgaaaactctatccatggcggtgttgatgcagcaaaaaagcttatgaaattaaaaaatacaccaaaagctttattctgtaattctgacagcatagctttaggtgtaattagcgtattaaataaaagacaaataagtatacctgatgacattgaaattgtagctataggtatgaacgaccgtgaatatactgaatttagtactcctcctgtaactatagtagatatacctattgaagaaatggctggaacctgcatatctcttgttgagaaattaattaatagagatatagaaaatcctacttctattttatttgatggtccattaatacttaggaactcttaatttctaaaaaatagctttatttattttaccttaaagctattttataaagctgttttactatccatatctttccccaaaagttacccctacattgatttgtccatgccgtttttgtcccgttttacatatactcttaacatttactcgtataactagtctatgaatttcaatttaattgctaatttttcgctccagcttttcataaactttactaccacagctatctttatgtctttaatgtaattactctataaaaactatattttataaaggagattttctatgagatttaaagctgaaatttttgacaaattgcagtttctatttgaaagctataaattcaatgatcacgttcttcactgcattataaccttcaatggaaaaattaatattccacttctaaagagagccctaattattactgtgaaggtagttcccattttaaaaagcagatatgctcaaaatattaaggaaccctattgggaagaaataatggatataaatttagataatattataacggttgtaaatactaagggtaagtttcatgaattcatagtatctgaaattgatgcaaccaaaggtcctcaaatcaaaacttgtttacttgatttgtataataaacacactctagccatacttataaatcatatgatatgtgatgctgctggttttaaaaaatacctctacatattatgtgatatctattcaaatttactgacgaatgatgaatattgtccaaactttactctaaatggcagtaggagcattcaaataataaatgatgaatttaactttatccataaaattagaacctttatctctcaaagaaaagagagcaatggtattattaatttaaaatttccaatgagttccgaaaaatcttttaatgcctttatacttacacacacaatagatgctaatagatttaaacgtattaaagcctattgtaaagtacacaacttcaccttaaatgatgttcttcttgctgcttactatagagttctctataaaacctttaatgaaaacaagcttagcatttcagttgcagttgatatgcgaaaacatttaaaatcaaaagatgtaaattcgctatgtaatctaacttctactgttataagcgtaattaattatgaaagcaatgatactttttatgatactgctaaaaaagtaaatgaaaacatgactttgaaaaagataaattccattggactgaatggttttgttaaaatatctcttctttttaaactatttagctacactaggttaaaaaaattattatcatcacattttaataatccacttataggaatgactaatataggaattttaaatcatgaaaagctctgctttgatggtacagaaatagaaaacgcatttatgtgtggctcaataaaatataagccttacttccaattagcagtaacaacttataacaaaactatgaccttaagtataaatctatacggaacaaaagaagataaaaaaattatagaaaacttttttactctatttgataacgaactccctgtgtaacttatggcagttctaaaaatcactttttataagaaactgcaataatgttatacttatataaaactgtgatactggaggttatatcaatgatagatttattaaaaactagaagaagcataagaaaatacaagaataaagaaatagagaaggaaaaggtggatactcttttaaaagcagctcttttagctccaacttctatgggtaaaaggtcttgggaatttatagcggtaacaaataagaacttgatttcagagctttctacagcaagaaaaatggggagtcaatttctaaaaggtgcaccactagttattgtagtagttgagaaccctgaggctactgatgcatatatagaggatggtgccatagcatcaactttaatccaagttactgctcactccatgggtctaggctcttgttggtgtcatgtaagaaatagggatagaatcgattatgacaccactgaagcttttataaaaactttgctaaacattcccgaaaacctaaaggttgaatgcatgctgggcataggatacccggacgaagaaagaaaagcttatacagacgaagacttagctttaaataaacttcattacgacaaatattctaaatagacaaaaaaagagaaaatcagcacaataaagctgatttcctcttttttattataataaaaaactttatacccaaaaatagatgttttaactttccgatatcaattcaccatggtattaattgtgattaattatcatcagtatgtttggataatatagcttgggataattcttaaccgtagtagtaagttaattgtgtacaatttttttctctaaaaatcatacggtgtctatacatatttatttcgttggggatgacgattatatcacccaaactactgctgacattaattctatatttttcagccgtgtatactgaatcttctcttactatatctgaactctcattaaattctcttatactttttatatccgaatcatgtgtatcaatgtttccatctaatttatttatcttatcttcattataaaatttgctcttatattttaatatgaaatattttaaagatagacataaacctataaacttagaaaaaacatcaaaattttgggttcctaagtgcccacctcctagtcttttcaaatttgatttaagaataagggttttaaaaagtttcatttagccactcctccaataattaattctctaattattgttggcaggttgcaccactaactccaaatttctaaggtgcccaaatacaagaaattcttcacagtctccaacgcttaattttttgttaccttatttaaaactcttaacaatattattttcgtatagtttttattttctttaataggtaaatcaaaaaaaattaatattttttatcattttttgtagactaaagccgaaaaagtcaaattatatattttatatcccattttttttaatacaatacacttaaaaacactaattaaaagtccttattattgtggtattaaacttattgtgttatccgaagctatcacattataaaaaggtgattctaattttgaagatatagcattattaaaatatccgcttatagtattacctgtaatattattataagtattcgatggatctggctgcacccttattccatatgggcaattattacttaaattaataatagtatttccatatacatttgaattagtaaccatatagtccatcattattcctgagtcatatgttgtattccacgaatcaacttcgccttcctttagattatagtttgaattatttatatgattttgagatattgataacttatccgaataaaggacatatacaccattaaaatctgttgaatctattgtgttgcctgctatttcagattcttttaagttacttgcttcaattccaaaatatctagaacctattattgtgttgttatcaatttttaagtcatccgctctataatttacaggagttactgaaggattttctcttacaaccgaaatacctgagtttgtagaattttctattgtatttcctattattttgttatcgtaagctggaacagcataccttattccattagttggagaattttctatgacattatatccaacttctgagtttctagataaataaaatgctaccctagttccaataataacgttactgtctaaagttccataactctgctttgaaaaaaatactccgtcgcctgaataacttgaataaatttgatttttttctattacgttatttatgtttaaattgctattttcaatgtctgctatgtcatctgttccatccttaacaaaaactaatgcatgattatttttagcaccataaatttcacaattctctacactaacattatttgagttatgacaagatactgatatacctcctgcctgattattgatatttaaattagagatctttgcaccatctgcgctaatttctaaagtatttcttgatgcgttggtttgtactatttttgtattatccttagattgtccttgtatacttatattaggtacattaaggtctatacttccatccaaattatacacaccatctgaaatatagaactttgtcttaccttgtgctattaatgtatttattgcattgtttaaggatgttcctgaatacgttgctgaatcaattactgtccagctattatcaatttgctgagcttttagctttccgcctcctgcaattatcataataaatgtaatacaaaatagtaattgaatcttaagtgaattcattttaatttttttcatttttatttcctccattaattaaattttatatagaaaaagcttgtacaaaagcaagttttactttgtatttgcgttgctagaagacggcatcgttattatatttaccacattgccatcacccataatattactaaacggagcatcagatctcattgatataccattcttaaaaaatccatttataatattattcgtaatagtgttcttacaatttgatgcatccggttgtattcttatgccataaggacaattatccattgaattagttattgtgtttttatctaaagtagagttacttaccatatagtctagtattatgccagaattatatctctcatcccagttttgagtctttccatctactaaaagataatttgaatttcctatttgattttgaactacttgtatggaatccgaatataagatatatataccattgaaatcaatattatttataacatttccctctacttcagcgccctttaaattattgatttcaattccaaagtaccttgaaccagttattgtatttccatcaattttagaaccactagctctataatctgttggtgtaacccatggcttttcccttgtcactaatatacctgatgacctagtgtttcttattatattgcctaatatattgttactataagcaggaactgtatatctaattccgttagtagctgaatttttaattttgttataacttactgttgaatttctgcaaaggcgaaatgatattctacttcctacaataaaattactgtctatagttccatggttttgtttcgaaaatagaactcctccatctgaaaaataggaatgtatctcatttccctcaagaatgttacacatattcaaattactattctcaacatcttgtatgtcatttcctccatctttagaaaatactaccgcttgatcattttgagctccataaattacacaaccttgtacattaacattattagaattacgacaggatacagctacaccacctgactgattattaacattaagatttgagacttgtataccatccgaattaatttctatactattttttaatgggttgctttgtacaattttggtacactcctttgattgtccttgtataattacattaggttgatttaattctatactgccatttaaattatagacaccatttaaaatataaaactttctctgaccctcacctattaatttatttattacgttatttaaagaagattctgaacatttagacgtgtctattgttgtccaagtagcatcaacttgctgagcctttaatttacttgcatttagtcccactacaaatatcatacaggtaaataccataactccaaaaatggacattttagtttttctcatttttcatacctccaaaaatatttttattgtttgttaaagtttacactgttaactttaacctcacaatatatacttcgtatattattttctatttttaatactttttgaaaagttttttcatattatttatattatgcttaaattaaataaaaaaaatgaaattattataatatttgtaattttctttttatctatcaaaaaaatcccgatgggcaattcgggatttttaggggagctgagatctaataaatcaaacactgcaaaatttaatatgctatctggtttcctatttatgatctcatatatttatttttaataggcacagatattaaatgcatgcctacagataaacttatttttgtatttcaacatctacattatagttgggaaataactttccattattattatctattgatatgtccacaggtatattagcttctccgctggatgaagtttgcatacctgtactgcttgtgcttgaaagcacttcatttcctattcttgtaactttaccttttaactttactgatgaatccgatgttggtactattgttacatcttttcctacctggacatcttttataaattcttctcctacttttgcctttacataaaggctgtttaaatcctgtaatttaagtacacttttttgtgctgatagtatatctcccttttcatatcctatatctgttacaactgcattatccatatctgatattatgttttgaccacttatgtaatcttctgatttatttgagttatacccatccatctctacaagagtatcattctttttaactatctgtccttcttttacgtccatcttacttactttagttattgactgcatggaagagctatctattactatattctctacatttgacgatgctatagttcctgatgcatcaactgtatttttaacctttggtgaaactttctttaccgttttgtcagttttagcctgactacatcctgctgcaaatatcataagacctgtaagtgccattatactaaccattttaatttttttcatttattgttctaccacctttccatccttaacatatattattctctgtccatactttgctgcctctgaagagtgagtaacctgtactatggtctttccttcttctatatttatttttctcattagttccattacttccgttcctgttttactatcaagatttcctattggttcatctgcaagtattacatctggttcatttataagtgccctagctatagcaaccctctgctgttgtcctcccgacagctctcttggagtatgtttccttctctcttcaagtccaactatctttaatatattttctagtttatctctataattttttattttctttccatccagaagtattggaagcataatgttttcttccacattaagattaggtatcaaattataaaattgaaatacaaaaccaacatctcgtcttctcattatactctgttctttatcattcatagttgagagttcttttcctgctattttaacgctacctgatgtgggtttatcaagtccgccaagcaggtacaaaagagtacttttccctgatcctgatggtcccattatagatacaaactctccctcttttatatctatatttatatctttgagcacctctacatccattttgccaagtttaaatattttatttaaacctcttgcttctattacgcttttagcctcttctcttgctaactcttccattttcttacctccttatttactcatatttaatagcttctataatattgagcttagatgatttaagcgatggaacaattgatgatataacagttattaaaactccaagtattacacttgttataaacgcacctgacgaatagtatatctccatagggaaattagatatatcaagcatagctggtataacatgaatcattaaacttcctccaactattcctcctatactacctataagacctatagataatgcctcaatgaatagcatttttcttgtttggtgtctattcattccaacagaagcataaacagcaagatgtctttttctttctataaagcttataaagaaattgttaattactccaaaagctccgattatgagggctattataggaaatgcttttattaatgataacattgcattattttgctgctcattttgcttttccattttagctattgtctctactcctatttgccttgttttaaacttctcagcaaataactttgccatactatcaggcgatttagaggtcttaatatttaaagtagagcattgatataagttaaaatctcctcttgcatatttgttaggaataataacagaatttccattatacatcatgctatcataggaaccaactatcttgtaatccttgcttcccctatttgttttaattgtaatgtaatctccaacattttttttaaatcttttgagattactagtcgtcattaatattgttcttccatccttataagcattaaatacacttttttcatcttgaagaagctttattttccagaagttctttatataatactcatccataaacataatatccgaaatcttatctgtacttcctgatacctctatatttcttgcttcataaccttcttgtatttcttgaactccagcagtattccttacaatattaatggtttgcctgtctagagaattaccatcattattacttatatacaaatcatgattaaatatattgtatgcattaacaaccgcttttcctatacttccactgattatattaagcataaataaggttgatattccgatggttaacaatgcaatattgtttattaagctcttatttttcctaaggttttttgcagcaagacttccctcatttccaaatataacattataaattttatcaaatattgtaacaaagatttcagtcataaacggaactaccattacaactccaaccactgaaagaatcatacaaattccaagtaaaataagcgatggagtctttcctaacgcacaatttttagtaacaataggcatagcaaaatcactcagtataaatataatccctaaaataagaacccatagtttttctttttccatagtatctactgtattaagaacaacatccttaacagatagcttagatgtcttaactattggaattatagagcttaaaactgaaacaattattgcaaatacgaatgcacttattaactgcttcggagtgtaattaacagaggctgtaatgctcattcctcccgaagcctgagctgcaagaactgccataagcaattttaaaattccaattcctgcaaaattacctacaactccacctattattccgtatataatactttctccaataagtactaggcttgtagacattcttgtagctcctatacttctaaaggttcctataactggtagtctttctgcaactattaccttaaaaacagtatatataataaatgtgctcatcattaaaactactatcatcataactctaaacaccatggtgatctgtccaagtgcttgatctataaccttttcgtccactatcttggtaaccgaataatgcttatatgctgttgtcaatttattaattacagtgtctatattatttgaattatgaactttaacataaatctctgaatactgattagtaactccattaatatttccagctataacttgtggtactacagctgtcattgccctatcactatcactactgaacaaacctttattattagctatacctactattataaaattttgcttatctccattttttccaaccataagaggtaacttctgtccaacagtgaaaccgtatttatctgctgtcttcttacttactataattttatttccgctaaaaggtttaactccctcgctctggtttaaatccacaaatcccatagtctgcatgtctgaataatcaaatccactaagagatactcttacatccttatcagaattcttatatacagcacttgcatcaatttctccaattatgtaatcagttttatcccttgctatctcagctttgtctaggttgacatatggtgtaggtgatttgctatttgcacttattattatgtctgaactcccagcaaactgttttacaatatcaatataagttgcttttatacttgtacttataccgctagaagcaaagtacagtgcagctgacgccattattgaaaacacaaccagaaaagttcttaacttcttttcctttatattcttaagcataaatttaagaattattgccattaaagatttcacctcaatccttattttaaaattactattatgttagcaaacctcttagacatatattaatgtggaaacttcttatattttctgctttaaaaaagcctccaaagtatccttaatttaaatctattgttaagtttgcatttcacgtgtattacataaatagtacactattaagttattttagtcaataccatatccttactattttaatcttttgtagttactcctttttatttatactttccatgtttaaaaatgttataacactgtttataccctctctctttattttgtaaataattatattcatttactgattagattaattatagctcatttgcctgcttataaatactgacaaaagtcacatttttaataacattaactataatatatcacttagtactaatcattacaaggtactatttaatatttgcattctattttactataaaaaatgaggagaactaaattccccccatttaaaaattacaccttattcagttctttgaccttacgaacaaaagtccttacattttctttctcttcttgaattttaccgtttgacataggctgtcgtcctaacctgtcacataaagataagagtgctatctcatcaagagaagtttccttaagcatatttttagaatctgcaaaagacatgttctttacaacaaacaatgtttgcatgtgccatcttacaagtttaatcaccttatatataaaatcttcatcctcactaaaacactgtaggaattcccttgacattgtttctccaaccttatcatgattatatgaggttatcttaccttttcgaactttcgttgttttagcctttcctatatcatgaagaagacttccccacataaatgctcttttgtcactactcttttctctgttctcagcagccttatcaactacaagcaaagtgtgattccatacattgccctcaggatggtgttctttattttgctctgtatgaaccaaatcacttagcattgtaaaaggatatttatttaaatttcctttattaagctgctcgtttaaatattccgatggccttacatcattaagcaaatgtttttctatatccttaaaaagttctttgctctcttccatagttatcccctacttttataatatttttgcaagcctatcattagttttttgtattatttcatttggatattcaagatattttaaaagttttacagcatttctcgtcttacatattccatacttcaacttgtaatcgaattgaagaccttcatcatctatatcctcactaaagtaacagcacaaataatcctctttcagtatttccgtaagctccaaatcatgtgttgcaactagagttaatgtgttatgtttctctatataatttaaaatttcggctgaggcgttaactctttcaattgggtttgttcctctaaatatttcgtcaattatacataaaacaggtctatcatcgctgcactgatttattattctcttaagtgcctccgcttctctaaagtaatagctttttcctgaagatatattatcctcgggacttatagatgtcattatcttaaaaaagcttgttttatatactttagctgcacacgtatatattgtttgtgctaaaagagaatttaatcctatagttctcaaaaaagtagactttccagccatattagttcctgtaagcattattccttttccatctaaatctatggagtttgatactgggttttccaataatggatgatatatctcgctgcattttattatccttccattatctacaaattcaggttcacaataatactgaatccattgcctaaaggatgctatggacataagtgcatctatttctccaagggctttatatagctcctttaactctttacgtaattttcttatatcatttattgaattaaagaattttctttcttcaataggtaatatattgtaaagagcatcacctattatatctacaccttctaccctctctattccagctgtcttcttagctaccttcataagcttagaagatgttgcttttaaactgtctgtgtaatacttaatttcaggacaattaatcttagaaatcctgttcgctgtgtttattatcccatttaaatatccaagtgattgaacatataattcaaccttattcttaaacttattgtgttcaatagtgttcattaatataaaggctgctaagagaattatgtatccatatttaagtattggtattgttaaaattgatgctagtgtaccccaaaataaaaaattgaatacatatttatatttataatcgacctcaatgtccttccatataagatccgtaactccattttctttttttcttccaagcttaataagctctaatccaactttttctctaacttccttgttattttgaaatatctttataattgaatttctttcaaggagcttttccttcgaaaattcaggtgttttaaatatcttataaagcatctcttctcctggtgatgttaatgttctatctgcaagttcaaaaactttattcatattaaggtcttcccaagtttgttcatcaacattaaactcatctgcattatcttccttgtgaaattcaaaaaacttttttacatttcttgtgtttcttttcctcttttgaaattctccccaataccttttaaatctttcatagtttagcttatgaattatttttgccttcatgtaaaatgctaagaagattgctgctatgcttaatgcagttcctaaaaaataaatataatttttatagcctatagctaattgaaaaaatacaaatgcagatatacctaaagccagcgttgcaattgcactgtacatatataatttatcctcatccataatatcttcacttcctttcccaaattaatgaaattatattgcttagtaacgtataagtcaaccgctacggcaaaattctctttttatctcttacaaagaaagcagcttctcttatattatctaagtttaacagtttgatcgttatcctttcaagtccaatggcaagcccaccatgaggtggcattccaaacttaaatacatcaagataacttttaaaactttctactttaagtcccttatcaagcatgctttgtcttaacatatcataatcatttattctctgtccaccggttgtaatctccatacctctaaaaatcaagtcaaagctgtgagttaaattttttccacatggcattgtatacataggtctcttatcttttgaatagtgtgttaaaaatacaaagtcagaattatatttttcttttacaaatcttccgataagctcttccccttcatgatctatatctgtagtaagctccttcttattgtacacttctctcaatatagtgatagcttcattaagaggcattattggtacttcttgtattgtaggtatttccacctttaaaagctcaatgctcttactacacttttgccttacattttgaaaaatatattttaaaagctcaatctcgaaccttattaaatccatttcatcatttataaatcccatctctaagtccatgcttatatattcattcaaatgtcttttagtatcatgactttcagctctatatacatgacctatttcaaaaaccctttcataaccggctgccaccatcatctgtttataaaattgtggactttgagcgagatatgcctccttatcaaaatacttaagtttaaataattcagttccaccttctgctccttcagaaactatcttaggagtgtatatttcagtaaaaccatttttaactaaaaactcagaaaaaccatgtgctatttctgtttctattttaaatacagagtttactctgctgtttctcatactgagaattctattttctataagagtatctatatttaattccatatcctccttatttatttcaattggaatcttctctaaagcttttgataatgttttaatgctatttacttgaatctcaaacctaccctcattctctttaacgataccctctatctctactacactttctaatttaagttctttaacatctattttctttgcatccacaacacattgaattattcctgttctatcccttaataatacgaacgctattttccctagctttcttagcttgtgcacccacccttgaagcttaactacttcttctaattttttttcagtttcatttactaagcatctttccataaatttacctcctaaattttcaaaaaataaaaaatcgcccccaaaagggacgattttaaacgcggtaccaccctgattaatcaatttatttaaaataaaaaaagcctccactccagtaaggagtgaaggcttttcacggtgccatcctttatttaaaatcaaataaattgactctctttatcattttaacggtagaaaccgtattatcctaataatttcagataatatgctccgagatgtctttcagcttgatattttacttgggctcacaccatttcccaattcgcttataaaacttatcaaatttacttttctcttcttcgcatctataaactttatttttatacgattatatacccaatacatagctatgtcaacatatttgtaattttcttatttatattgtattatttgtattaaaagtaattatatacttagggggtatttttatgaaaaaaattatggtctctattgctcttttacttactatcattttaggactttcttttaatgtaaaggctagtgaggttaactgggacagatcctactgggatagcctggattgtggcatatactggtatggtatggacaacaaaccttacaagttcgtttcaggtcaaaccaacccagcctttgacccttccaaaccaactataatatacatacacggttggcagcctgaatattatctattaaggcatagagagtctttttacatttacgggaaagatactgcagacgactggataaaaaaaggttggaacgttggtgtattctactggaatcaattttctgacgaaataggtgttttagatgcagaagccaaaatatggacaacaaaaggtcctcagggaatgcgttggagaaagggagatggttcatacgagactgtaaatacggtaaacattcctgcctctcaacttttgtatcaaaaatatgtacaagctatgaaagattatagaggaaatgaaattagaattgcaggacattcccttggaagccaaatggctattttacttacacaacaaataagcgataatgtagactccggaaacattccccatgaacttttgcctaaaagagtcgcacttttagatccctatttctcgaatttaggtaaaccatatctaggttttaaatggaccggagaagtttgcagaggctatgtgcaaaatttaataagcactaaaaatattccatttgaattatatacttcttccgatttaactcgtggaattgctggggatgataatattggccttcaaaaaatgtgtgcaacttcttacatgaagcctactttttataatgatcttcaacaaatagaaagacactacgctgcaaaatacaactacttttcttctattgcttcaaatcctcctcttgaatatgccaataatcaattgactggaaacatatctgcttcagcttcaacaccaacttccagaatagctgaaatgatgggaccagactatcattggattcaaattggtggaaatgcaactactgatacaaatgatgatatttatgaaaagcatgttgacagtacaaattatttcccggtaaatgatttgacgcttaactgtgataaaacttcaattgcaactggtgaatatacttcaataaaaacaactatagctcccgagaacgctacagacaaaattataatgtggaaatcctcaaatgataatatagctaaagtttgtgttgatggaattgttgaaggtataagtcctggaaatgctactattacagctacaacaacaaataacattacaaaaacaattagtattatagtttataaataataaaattatagaaattgggtgttttaatgattagaaaaaaagtatttattcctttaattatagtattttgcattgtcgtattggtaggtggagtttactatggtttctctaaacataataattccgttcaaaataaagtgacaaatttaaatgcctaaaatttacacagaatagtaccaatgctaatgataaaatagtttttgtacagtttcaaggtacaagaaccataaaaaatatatatgctaagaaggcatctacaataacaataaaatgcaaaccaagtattagttcaggaaatgctaaactttatattttagattcaaattacaatatattggatacatttgattgtaacaataccgttagtaagaaattaacaccatctaaaaaagaaaaatatattttaagattacatggtgataaatcaagtggttctgaaatgattgaaatatcttcttcaggtaatgtaacaataaaaaacgcaactatatgggattagtacgtttttatatataaccagaggttaattcctctggtttattgtgtctttgctataacagcaccataattgttcatttttaatgtatacaccgttttctctccacttttaggttctattccaaaaacattatacaatactctttccttaagtaatttcttttctaaatctttgtcaacctgtattccataatttttaagcgaatccttccaggttgtaaacttacatccacctttccattcactacagtagaaagcttttgaattctcgtatacctttcctcttttacaaaatggacactctcctatagcctcaggaagttgtttgttcttttgaggaaacttactatcattgttctgaaaaactacacttcgatttaccttcacagattcttgtattatatattgaacatatctttttatactttgcataaacctttctgaagccattttacctttggaaattgaagacaaacctttttcccacttaccagtagtttcaggtgatctcaattcatatggtactatctctattagcttcattcctttatcagtagggtgtaggctttttcctttacgctgtatgtatccaacctgtattaatctttctattattgaggctctagtagctggtgtaccaagtcctccatctttaagctgttctttaagctgttcatcctccacaaatcgacctgcattttccatagcagaaagtaacgaggcttcagtataagagcttggtgccttggtctttttagctttaatttcgctatctttaacctggacactttcattcttttttaacttaggaagctcatctggctcactattttcatcatctttttcttttttatcatgcttataaaattccatccatccaagctttaaaatagtttttccctgagtcaaaaaattctcttctacaacttctgtaactattttggttatagtgtactcatagttaggataaaaaacacataaaaatcttctaactatagcatcatagactttaagctcatccttagttaacgtactcaaatttggttttacatctgtaggtattatggcatgatggtctgttactttggaatcatctataattcttttgcccattggcaatttagataacttaagtatttctccgacatatttgtcgtatggattaatatttaatcgtccaatagttttttttattttgttcaccatatcgtgacttaaatatctgctgtcggttctgggatatgttaccatctttcttttctcgtacaagctttgaactatgtctaaagttttttgtgctgaaaacccaaacttcttattacagtctctttgaagttctgttaaatcatataagagaggtggaacttgcttctttttcttattttcaatactaataaccttacctgtttgtcctaagatttttgcccccaaatcatctgctttctttttatccattatcttagattccttggtctctttatcaaaccaagttccattaaaaccctcgtacttagaaaccacttcccaataatcctttggctcaaaattatctatttctttttgcctcttaacaattattgcaagcgttggagtttgaactctaccaacacttaaaagcacattatactttagggtatacgccctactagcattcattccaacaagccaatctgcttctgatctgcactttgcagagtgataaaggttatcgtattctgtccctggttttattgtcgaaaatccttcctttatcgcttcatcagtcatacttgatatccaaagtctagaaaatggctttttacattctgctgcttcgtatgtatatctaaaaataagttctccctctcttccagcatctgttgcacatatgagggactccacactgttatcattcatgagcttttttattatattaaactgcttctttgtgccatcaataggctttattttcataacttccggtattataggtaatgtatcaaatctccattttttataaattgcattgtattcttctggctcccataaagttaccaagtgtcctactgcccacgtaacaatatatttagcaccaataagacatccttcacccctagttttacatccaagcacattagctatatctctaccaactgatggtttctcagaaataaccaatatttttctcataagcttaatcactcatttctaaattgtatttactagtttcatctatttgcatcatacttctatgttaaactatcttattaaaaaccaacttaataataagttttaaaacatttccaatccgtgattataaccgttactttatatattatacaacttgcagaaaaaatttttcaacggcgattttaacatagtatataagccatctaaaaaatcaaaaaactggcagagaacttttaattactcctttgccagcataattcttttatattagttatcttcattctctatgaactttcctatttgcctaaacttattatatctattgtctagtaattcattaataccagtgcttgaaagtccttcgattgcttttttaagattctctcttagggcatttgcaaccatagttatatcattttgtgctccgccatctggttcctttataaccttatctattataccataacctttaaggtcatctgccgttatcttcataacctctgcagcctctttagctctgcttgaatccttccataatatactcgcaaaaccttctggcgataaaagcgaatacactgagttttcaagcatccaaacttcatcagcaactgccatagcaagtgcgcctccacttccaccttcgcctataacaacagaaattactggaatcttcaagttcgccatgcttattaaattcttagcaatagcttctccctgccctctctgttccgcttccacaccgcaataagctcctgatgtatccacaaaacatattaaaggcctattaaacttttctgcttgtttcataagccttaaagcttttctatatccttcaggactaggcattccgaaattcctctttatattttcgtttgtgtttcttcccttttgctgacctattacagtaactggcattccattaaattctgcaactccaccaacaattgcagcatcatctccaaaagctctgtcgccatgaaactccataaatgaatcaaatattaaatctatatactcaagagaggttggacgttctaacattctcgctattgtaagtctttgccacggagttaattcctgtgaattttccattatatcagcgcacctcctaactgtgcattcttaggatatttcctaaagtaacttttaattcttttctttccactatcatatcgataaatccatgcttaaataagaactctgaagtttgaaaatcagaaggaagtttttgatttatggtctgctctataactcttcttcccgcaaacccaataagagttttaggctcagctagtattatatctcctaacatagcaaagcttgctgtgactccacctgttgttgggtcagttaaaaccgaaacatataaaagtcccgcttcattatgttttgcaagcgctgcgctagtctttgccatctgcatcaaagaaaacattccctcctgcattctcgctccaccagaagttgtaaagattattactggaagttttctttcagtcgcctcttctattgctcttgtgattttttcaccaaccactgaacccatacttcccatcataaaattactatccattactgctataacagtcttgtatccatttatgtttccgagtcctgtaaccactccatcttttaatccagtcttttcttgcatgctttttatcttagcttcatagtttggaaactctaatggattagctgccatcatatttttatcaaattctataaaagttccttcgtcaattataaattctattctctctcttgcattcattctaagatgtgcattacacttaggacatactttaaagttatcatcaacatcacttttataaagaattttaccgcactttgaacactttatccacattccatcaggtatggtaggttgattttcaacatcattattttcatccaagtttttactacttacagtaatatactttctcttcttaaataatcccacgcttatgccccctctctacatgattttcaatgttttaattctttttctataaaacttgtattatattttcccttaataaacttctcattgtttattacttcatactggaagtctacatttgtatcaataccatcaattatgaactctccaagagctctctccattatatttatagcttcagctctatccttgccatatgctataagctttccaatcatggaatcataatttggaggtatattgtatccagtatatgctgcgctatctaatcttactccaggtccaccaggaacatggaagtacttaatttctccaggtgatggcataaagttcttttcaggattttcagcatttattctacactctattgcatgacccttaatttttatatcactttgattgaaagataatttatttcctgatgctatttttatctgctctttaactaggtcaacgcctgtaaccatttcagttataccatgttcaacctgaattcttgtattcatttccatgaagtaataatttccatgcttatctaatagaaattctatggttccagcatttttataatttacggctttagctgctcttacagccgcttctcccatctcacgcctaagttcttctgtcataactggtgatggtgcttcctctaaaactttttggtttcttctttgaattgagcagtctctttctccaagataaactacatttccaaaagaatctcctaatatttgaaactcaacatgtctaggttcttctataaacttttccatatacattgaatcatcaccaaaggctgctttagcttcgcttttagcatttctaaaggaacttatgaggtctttttcttctcttacaattcttatacctcttccgcctccacctgctgaagctttaagcataacaggatatcctattctagttgcctcttttaaagcctgatcttcactatcaatagttccttcacatcctggaactaccggtactcctgcctttatcattatttctcttgcttttgctttatttcccatgttttcaatggtttcagcatctggtcctataaatgctatattacattcactgcacatttttgcgaacttaccattctcagatagaaaaccaaagcctggatgtatcgcttgtgcttttgtaagaactgtagcacttattatatttcctatgttaagatagctatcttgagttttcgctggtccaacacatactgcttcatctgcaagatatacatgcattgattctttatctgcctcagaataaatagccactgtctctattcccatttctctacaggctcttattattctaactgctatctctcccctattagcaattaaaattttacttatcatattattctctccattcttgttactgaaggattacttagctaacactcgcttcagtaatcctagaatttcaaaatttactttagaagctatactatcataaatgtaatttcagcttctactgccttttctccattaaccgttgctattccttttcctattccagctggtcctttaactttaactatttcaatttctaactttagtacatcacctggaactaccattcttctaaacttagcattctttactgctccaagtataggcttctttcccttatacttatctaaacttaaaattgcaacaccaccaagttgagctaatgcttcaatcataagaactcctggcattattggtttacctgggtaatgaccttgaaatatctgttcattaaaagtaacatttttatatcccactgctcttttccctggttctatttcttcaactctgtctaccaataacattggatatctatgaggaataatttccataatttgttctatacttaaactcaataaaaacacccgctttcaatttacttcaaagctattttaaataattcttgaccgtactctaccatttcttcatttttaacaagtacttctacaacttcaccatcaaattcagattctatttcattcataagcttcatggcttcaattatacaaagagtttgacctttttttacttgtgttccaacctttgcaaaagcttctgagtcaggtcctgaagattcatagaaagtacctactataggtgaagttacaactcttatgttttcatcgtctacgctaggcttatctattacttttttatcatcatcatgggtttgtgtagtaactactctctctattttattttcttgaatctgagcattttgaactacacttgtgctttcttcattacttgtgccttttctcattgttattttagttccatttgactctatttcaagatatgtaagtccggaattatcaatggtttttataagttcttctatttctttatagtccatgttatacaacacttccttctcaattactaattattactttatttatattttttaaacaaaagtgtagcattatgtccgccaaaaccaagtgaattggataacacataattaacttctgcgtttcttccttcgttcggtacataatcaaggtcacattcaggatctgcttctttgtatccaatagttggtggaataaatccttcttctatagccttagcacatatgattgcttctactgctccccctgcaccaagtaaatgacctgtcattgattttgttgaacttacaggaaccttatatgcatattctcctaaaacagtttttatagcttgagtttcaaaactatcattataagctgtacttgttccatgagcatttatatacgaaatatcttctggtcttacattgtcctcttccattgcaagtttcattgctctagctccgccctcgccatttggtgctggtgaagttatatgatatgcatcacaagttgctccataacctactatttcagcatatattttagctcctcttttaagtgcatgttctaattcttcaaggataacaattcctgaaccttcgcccattacaaaaccacttctatccttatcaaatggaatagatgctcttttagggtcttcactttttgtaacagccttcatagatgcaaaacctgcaagtgaaagcggagttattcctgcttcgctaccaccacttatcattacatctgaatatccaaattttatgtttctaaaagactctcctatggaattattagccgaagcacatgctgttactatagttgtgcatatcccctttgctccatatcttatagctaaatttccagatgccatatttgcaataatcattggtatagtcattggtgatactctgcctggtccttttgtaataagcttttcatcctgtttctctatagtaccaataccgcctatacctgaacctactataactccaaatctatttttatctatactttcaagatcaagctttgaatcctttattgcttcatctgctgctactattgcaaattgtgagaatctatccattctattagcttctcttttgtcaataaaatcttctggggtaaaatccttaacttctgctgctaacttcaccttaaaatctgttgcatcaaaagcttttattttatctataccacattttccttctttgattgagcaccaaaagctgtcagcgttatttccaacaggtgttactgctccaattcctgttataacaactctcctattcatttactgcaccttcctttacaatatagtttacattaccattccgccatctacatttataacttgacctgttatataagaagaaagatctgaagctaaaaatagaacaagattagcaacatcttctgcctctcctactttattaagtggtactgctgccactatactttctctttgcttatctgtaagtgcatctgtcatatcgctttttatgattccaggggctacagcattaactgtaattcctctacttgcaagttctttagctactgattttgtcatacctataattcctgcctttgcagcagcataatttacttgacctgcatttcctattaatcctataacagatgatatatttattattttaccactttttttcttaagcatcacacgacttgtatgctttatacagttaaatgctccttttaggtttacattaattacactatcaaaatcttcttccttcattcttaacaaaaggttatcctttgttattcctgcattgttaactaatatatcaacagttccatattcatccaaagccttttttataatagtttctgcttcatcgtatttacttatatctgcttttactgctacagcctttgaacctaactcttcaatttcctttataagcttttgagtttcagcttcactacttctataatttacaacaaggttagctccttcagctgctaatttcaatgctattgctcttccaagtcctcttcctgcacctgtaactacagcaaccttaccggataataacttttccataatatcctcctataactgaattttatttaaatcttcagctttttcaatattaaatatagtcatttttctatttattttctttataaatgaacttaaggtcttacctggtccaagctctataaatgtatctactccatcatccatcattcttcttattgtatcttcccatctaacagagctcatgacttgctttttcaataaaccttttatctgatccttatcttctacatagtctcctgttacatttgtaataactggtaccttcatatcttctatatttatattctttaattcttcttctaatttttcagcagcactctttagcatagatgtgtgaaatggtccacttactgaaagcattactgttcttcttgctccgctttcctttaacttagtacaggcgctttcaacagctttaacttctcctgctataacaatttgtcctggacaattataatttgctacctctactattccttcttttgattgctcagcgcatatacctctaactacatcaccttcaagtccgattatagcagccatagtacctattccttttggtactgcttcttgcatatatcttcctctttttttcactaatcttactgcatcctcaaatgaaaaactcccactgcaaacatgtgcagaatactctcctaagcttagacctgcaacaacatcaggttttattcctttttcttcttcaagtgctcttaaagcagctatactagtaattaaaactgctggctgagtgttctcagttaaatttaattcttcatcttttccttcgaagcataattcactgattttaaagccaagcacttcatcagctttatcaaaagtttcctttgcgctttggtaattatcgtatagatcctttcccattccaacatactgcgaaccctgtcctgaaaaaacaaatgcaatctttcccacttaatacatctcctatttaattctatctataacttctactgcttctttaaacatgctttcaactatttcatcacaagtttcttctttattaattagtcctgcaatttgccctgccattacagaaccattatccacatccccttctcttactgctcttggaagcgctcctcttcctaactcttccatttcctctggcgatgctccttctttttccattagcttatattttctagcaagcttgtttctaagaactcttactgggtgtcctgtacttcttcctgttacttctgtatcgatgtccttagctttcaaaactttattcttgtaattttggtgtacagtacactcttttgctattaaaaatcttgttccaacctgaactcctgatgctccaagtgcaaatgcagctgcaacacctcttccgtcacctattcctccagctgcaattacaggaatgtttatagcatctactacttgtggcactaatgccattgtagttaattctcctacatgacctcctgattcacaaccttcagctactacagcatctactccacatctttccattctccttgcaagcgctacagatgctacaacaggaataaccttgatgtcgtgttccttccacatatctatatacttacctggatttcctgctcctgtggtaactacctttacgccttcctcacagaccatttttgcaacttcttctgcattatcacttaagagcattatattaactccgaatggcttatccgtaagtttttttgccttccttatttcatctcttacatactcaactggtgcatttgctgctgctattattccgagtcctcctgcatttgaaactcccgctgcaagtgaactatctgcaacccatgccattccaccttgaattattggatattttattccaattatatcacaaaactgagtttttaacataatttacctcctgataagatctgcaaagcaaaccctttttattatataactcttattgctacttcttttttagttgtgcttcaataaacttaactgcatctcctacagtttttatattttcagtatcttctatttgaatatcaaatttttcttctaattcaattattatttgaaataaatctaatgagtcaacatttaaatcttttccaaaagatgttgccatatctatggtctctttatcaacacttatttgatttgctataacttctcttactttatcaagtaccataaaatattcctcctaaaatcacatgatgcaaagtatactgtattatttagtccatttaagaaccatggaaccccaagtaagtcctccaccaaaaccaactacaactattttagcacctcttttaagcaagccttttttattcatttcatctattgccagtggtatagtcgctccagatgtatttccatagttttgtaggtttataaaaaatttgtccatacttaatccaagttttttagctgcaaactctattattctaatgttagcctgatgaggtactatataatcaatgtcttctatatttagtccactatcttctataacctttttaactgagcttaccattaccttaactgcaaatttaaagacttctcttccattcatagaaatcttactgcttgctaaacctttttcatccgaaaatggatttatcacattagtcgctggacaatgcaagaagtcttttcccgtaccatctgaaccaagacatgctttaataattccgttttcatctccgcctcttataattaccgcacctgcaccatctccaaaaagtacacatgtacctctatcttgccaatcaagtatctttgatagtacctctgttcctactacaagagctgttttatactctcctgtttttataaactgagatgccgtattaagagcaaatataaatccagtacatgccgcattcaaatcaaaacaggcagcatttttggcacctatcttctcctgaacaatacaagctacggatggagtatatgagtctggacttgtagttgcaactattattaaatctatttcttctggttttatgtttgagtcctctattgcccttaaggcagctttagcacctaaatctgatgtattttcgtttatagatattcttctttcctttatacctgttcttgatgatatccactcatcactagtatcaactatcttagacatatcttcattagtaactattttttctgggacatagcttccagtccctataatctcaacactattcactttatcagtcctttttacagtttttaatatgatatttgtctctaaagaatctatttaatttttcaagtgcagaagttaggactctctcttcctctttactcaatccctttactgtttcctttaccatatcagaatgaaattttgcatgaattctatatgcaagctttcctctctttgtaagggctattttaacaactcttctatcttcttctgagcgttctcttttaacataaccctttttaactaaatttcctacagccgttgttagtgtgccaacagtaattccaagtgtagctgcaacctcagacatggtcctgggaacatacatacctatagcttctatcgtgtgtacttcagtaacagaaaggtcattaaaccctccctgctttaaagcagtttgttctatagttaaaatatcattaaaaagttcaactaaagtttcattaattatagtaattgttctatccaaatctctcaccattcatttcattgttaaactttcaatattttaaaattcacattcagcatcactaattaattcattaataagctctttcaccttaacgattttatctatcttataggatttagcaccagtaaataaaagcgcctcatcaacatttccatttactgcatttataagcgccttagaaatgcaataaggtgtatcctttggattacatggttttaaacaattatagcatttagttatagtaatatttttgtcattactttgtacaaatttattgcttattgctcttccaggcattccaacagggctcttcactatttttatatcatcttctttgcaatttacataaacattcttatagtttaagttagcatcacattcttctgtagctataaatctagttgccatttgaactcctgatgcaccaagttttatatattttgcaatgtcttttccgtaaaatactcctccaccgcaaactactggtattttaactccatgtttttcttcaaaaggttttattgcagtaagtactccagtaagtatatccgaaagttcttcatgtgaccctttaacttgttctgctttaaatcctaaatgtccccctgcttccggaccttcaaccacaatcaaatctgggattcttccgtgatgcttatcccacatcttacatattacagaagctgccttaggtgaagatactattggtgcaatcttaactttacttccttctactattttaggcaatgcagttggaagccctgctcctgatactattaaatcagcacctgcgtcaacagcacttttaacatatttatcataatcgttcattgctaccataaaattaacggcaataattcctcgtttactctcttgtttagctttctttatatgcttatttaaagctcttatatttgcattaaacgtattagtttcgaaatcaggctcatcaaatccaatttgcacacctgaaattgttccaactcctccgcaattagcaactgctgaggcaagacttgatcttgagattccaactcccattccaccctggattattgggatatcagcttttaaatctcctatttgtaaaggaggtaatttcattgtaacctctccctttttatattgattatcaaatattttgataatcaaagtatatataaaaacttaaataatgtcaacacagccaaaacaatgatgaatagaacttatacatgcactaaaatgcctattttaagtgtattttaatgcatgtatggtttagtagtttaacctacaataaaccttactttaacttcatgtactcatcaattttctctacccatactaatgcaaaattatattgctatccctaattcatcaaatttacctttaagctcatatgcatctttaaagactatcccgttaaagcctaattttattgctgcttcaacgttctcttctctatcatctataaatatgctttcttcaggctttataccacaactattagttaaagccttatatatttccagctctggttttaaaagcttcactttagaagatattattcctccatctacatcccttataaaatcatacttatcacttatcagcttaaaagcctttaagtgatagttagataaaaggtatattttataccctttctctcttaattctttcattaattccgaagttccttctactggtacatgcatttcattccaggtttccataacttctcttatatattttgcattatgtggatctctcttacaaaatctacaagttgcttcttcctccgtaatagtgcctctatctagctccacccattcattacttttaaatacattctcatacaaagcctcaactaacttatcatccttatatttgctttttaaaaactccacaggagtaaacttcaaaagcacatttccaatatcaaacactatattcttaatcacccaaattccccatttcatataaaaactatataataattgtacaccttaagaggtttggacgccagtccattatattcttgaacttcaaaataaccacctcttagcaatttcctacctctataaacgctcttctatatcttaagaggtttggacgcaaactcctttgacttaataaaatataaaaaatacgaggttggactttaaaactaaaaaatccaacctcgtattttttatctcatataatatattgctctacttttcttttcattatttattttagcttcataggttatatttcttttatgataggtatcgccataatccttcttttgattgtcacacacatatgcatccttgtgaattgaatcaacccatctcataaatatatatgtgtgatctggcacctcgtttttatctccactttctgatgtaaagcatatatctccctcttttagcttttccaaatcataatgctttttgaaccctttactttttaaaaaatccataagctcagttgtatttgcagtcgcatctggaaccatcaagccgccattcctaagtgctcctgatgcaaagtaaacacatgtattttcacttttgcctccattaaggcttatggcagaacttaaattttcttctctatgattactatcttttaaatacataaccgttctactaattgccttagaatttctctcatatctaaaaacattaaatccaacataaatagctattataaaaaggaaaactacgggtaaaattactttcttattacctatcttcaaaacaaactcacctactcaaacctaagagaatctacaggatttaatttagctgcttttccggcaggtaaaagtcccgctaacattgaaacaattatagtaaacaaaatagtaaatattattattgatgcccttatatctaccatcttcataccagcttcaattcctcctactttataggctacaagtaccttattaataataaccgatgaaattaaagctactattgttccgcccattgctcctaaaaatccaaggctaccagactgcactataaacattctctttatattccttcttgatgcaccttgagctttcattattccaatcattttagttttttcatgtactgccatagtcattgtatttataacacctatagatgcaactaaaagtactatagcacctgcagctataagaagtattttaaatatcaaatatacattattaatctggttagcataatcaccttgggcaatgtatgaataatttaacttttgaattctatggctcacgctagaaacagaatccatatcttttgcttctacagttactttatcatatcctttttcattgatataatctttactattcatataatattcctgaatttttgctgccatgctgtcgtttcctgtaattacaattcccccattttcatagagtttgtttaccacaccagctaccttagcctttataacaagcggtgccttttctggcatgccttctattttaggaaattcaactttaatctcgatttcctttccaaccacacttttttcattggttaaacctaacctttttaaaagtccttttcctacaagaaccgaattttcatcagttttctttaaattttcacctgctataataggcttatatccaaattttttggacttttccttatccattctaacttggttctcactagctttattaaacacatcataatctaaattatatccttcaaagtctaccttctgtaatgttttattctctaatttaactgttgaaacctgtgttcctatacctgcatttacacttgaaacaccctttatatttttaaacttgttaagaatattattatctatcttcttatcttttgcgcttggagctgattttccactagccttctgatttacatattcataagggcgaactgtaataagtctcatagaatccatttgtttaatttgatccatacttattttttgaacgccttctccaaagcctcccattaatataactaaaagagttcctatagctataccaaatgaagttaataccgtacggaattttctcttatttaaatcactaaatgccattttaatgcaatctgataatttcatgaattttatcctcccttacgaatttaatgcatctactggatccattcttgacgctttacctgatggatacattccagcaagtactgctataaaaatagaaaaagccagagttccaattacaagccagtaaggcataacgatatctaaagattcttttatatttctacttctcagatacgcattcaatcctaattgaactattttaacatttataaagctaaatataagtccaattactccacctagtactcccattattcctgcttgaagtataaatatgctccttatttctcctctatttgctcccatagatttcattattcctatagatttagttctttcatatataaccatagtcattgtattaactattccaattgccgcaacaaaaagtactataagtcctaaaaccgcaagtatagcttccattatcttatatgagttttggcttctctttacaatatcctgatagcttacatagtagtatcccatattctttattgattttcctatgcttagtgtattctcggtatttttagctattataacaattgactcataaccattgctttttaaataatcatcctgaaatgtatagtagctttttattttatttgtaagttctattgacgccattatttgattatccgcttcaaatttatcgcttataactccaattaccttgcctttaactgtaagaggtgctactgttatattttgattttcagttttgctctcagttatatctatttccttaccaacaacagccttgtaatctgttattcccatagcctttagaaacttctgtccaacaactacaccatctttatctgaactttttaagtttcttcctgcaataattggaacaagcttatcattcttattattttttctaactgattttatagtactttctgaaaaactattatcattattatatgaacccattacctggtttacattcttattttcttttccatctattttaatattatcaacattaataattatacttgttgtaacattctctattccaggtattttctttaccttttttacagttgtatcatctatctttttatacatatcatcttgattgaaactactcatatcagtgttctcaggatcaaagtatttttcgttcatgacatttattagttttaacgatgtactgtcttcaacctttcccattgccattttctcacctgaagttccaagactgactaaagttactacaagcattgttcctaccgctatagcaagagatgtccaaaacgttcttccttttcttctagtaaggtcccttcctgccattcttaagccatctttaaatttcactctcatcaacctcctcaacctgtccatcttttatcatgataagtctcttagcctttttagcttcttccatattgtgtgttaccataattattgtatagcctttttcatttaaatcttctaaaagcttcattataagagctccatttttagaatccaaatttcccgtaggctcatcagcaaaaattatttgtggttcatttacaagcgccctagcgatactaactctctgcctttgaccacctgacatttcacttggcctatgctttattttatctcctagcccaaccatctcaagagctcttttagccttttctctccttgcgtttcctcctattccagcaaaaataagcggcatcataacattctctaaagcggtttgagtgttttcaaggttaaacgcttgaaatacaaatcctatagttctatttctatactttgacatttctttatcttttaatctacttatatccttattatctacacgcacacttcctgatgtaggagtatctaatccaccaacaagatgcattagtgttgattttcccgaaccagaaggcccaactattgcaacaaattctccatcgtgtattttaagattaacattattaagcgctgtaactgtttcctttcccattttataaactttagaaacattctttacttctatcataatttaaacctccaagctttctatttaacaactttttgtacttatctatgtatcaattttaataaaccaatcttacatttaaatgaaaagtaatcttacattttcttaatgaataccatttcataaaaaaataaggtcttttaactttcattaatagctaaaagaccttatctttaaaacaatacgagtagttttttaagctccatattgtttatttgtaatttttaaagtttaaacttctattattataactaatattttccccgaaaagttataaaaagcttgttcgcattttttctgtggcaaaccacattggtgattccaccatgtctacaactaatatttttacttgcttagattattttaatattagcaaaataacctttatatcaattaaataaacattcccaataattttaataaattaactaatccctgcctactatgtattgtaagcattaaccctttagtgaaaagttttgttatatctctgatgtaatttgctagcacttacatttactatattatattaatttatcaacaaagtcaatatttttttaacaattgtataaataaatgccttgatatttaatgtttacacatcatgtattgatttatatatttttaacatataatgctggtaattacaaaaatagatgcatacaaaaacatatgcatctatcttacatctaaagattaattatctctcttctaatccaatcaattactgcatttacaactctatttctaaccgtttgcctatctccaggcatattaagttttcttgttttaacctttccatttatacataatcctacatacacaagacctacaggtttttcttttgtgcctccgccaggtccagccacacctgttgtagaaacacctatatttgttcctgccgttttggctattcctttagccatttccgctgcggtctcactgctcacagctccataactttcgagggtttccttttttacaccaaggcgattcattttagcttcattactataagtaactgctccttccataaaaacctctgatattccaggataatttataagacgtcccgataaaaggcctcctgtacaggattcagctgtagctatggtaagctttttttctataagcattgctccaagtacatcttctaatgaagtatcacctactccgtatacattctccttaagtctctctcttacctttctttccataggctctatgagtttcattgctacttcttcactttctgcctttgcagttattctaaaggtaacctcattatccttagcatatggtgcaatagtcggattagtctgattatctattaaatccttaagcatctctgcagcaccgctctctccaataccacaaactcttaaaaccttagaaacaattgttccttcctgatattttctaagataagggattacataattcctaaacataggtataatttctcttggcggtcctggaagtaaaataactaccttgtcattttcatcaattatgcatccaggtgctgttccatgatcgttcttcagtattgtgcatccttctggaaaataagcctgttttttattattctcacttatttcctttcctattttattaaaaaacttaactatttcatcataggactccttatgaaaaataagctttttattaaaatattcagctgccgtttcctttgttaaatcatcgtcagttggtccaagtccacctgttgttacaacaatatctgctctatttatagcaagctcaaattctctttttagtctttctacattatctcccactactgcttggtgatacattgagaatcccatagccccaaactcttttgccaaaaattgagcgttagtatttaaaatatctccaagcaaaagttctgtgccaacacataatatttcaactttcatgttaaatccagatttatagaaattctatatctggtacttcaccaccattctacttttaaaattcattcttattatactacatttatacaaactttctatttcatttataatttttgccatatacatctatactttcctaaacattttaagctttacttaaatacactaattgtaatgtatatatatgtcctatataataatattatcgcattttaagattaaatgttataatttaattatataatttcattacgaaaggcggcaccactatgagcactttcatgtttaaaactaaaacaaacgaagtaacacctattagcaatatattcatagaaaactatatgacaaaagcacgaggtgaatacgtaaaggtatatctgctaggtttaaaatattgtacctcaggtgaacctggagtaaattcttctatgatggcttcaaaacttcacctcttggaaacagatataataaatgcctggaactactggaatgacgaaaacgtaataaaacttatccctatagataacaaaggaaatttcaatattcaatttcttgacttatcagaagaatctcctgaggatgaaaaagtggatttgctaagtgaattaaacaatacctccataaagggaatgcttcaagatatagaaaaattgcttggaagaaccttatctccaaaagagatgtctacatatataggctggcagaaggaatttagcttttctccagaactcatacttctattaatacaatatgctgtatcaaaaggcaaaacaaattatagatacattgaaaaaatagctctttcatggcatgactcaaaaataaaatctatagaagacgctcaaacctatataacaaaacatgaggacaaatggataaaaatacgcaaggttctagactacttaggaataaaagatgccgaaatcatgaaacctcaagaacagatgcttacaaaatggttagaatcttttagttttcctctcgatgttatatttagagcttgtgacatatgttttgaaagaataaacaaggctgattttaaatatatagatgccatattaaccaactggttcaaagcaggaattaaaacattggtagatgtagatacaaaggatttaaaaaaatctacatttaataaaaaacagcaaaatactaactttaaaagcaaagataattttaataattatgaacaaagaaaatacgattatgacgatttagaaaaaaaattgttaggatgggatagtgacgatgattaaaggatattctgaaaaagtagaaaaaatttattctaaactaagaaaaactgaagaagataacttaaaaagcagaagagaagaaattaaagacaaattaccaaagataataaagatagattccgagataagtagactttgcctaaaattatctacaaatatatttaaaaagataaataatcgtgatgaatatataaagtccttaaaaaatgaaataacaaacttaagaatggaaagatctgaacttctagtttctaatggataccctatggattatcttcaaatgcattataactgcagtaaatgtaaagatacaggatatataggtgcacataaatgttcctgctataaaaaatacttagttcaactttactatgataattctgatcttaaaagtcttttaaacgaaaataactttgagaattttaatataaactattattcaaatagaaaatcagaagatgagccaagaactcctagaaagaatatggaaaagattctttctttatctttaaattacatcaaaaattttagcgattcaaacgaaaacctattgttctatggcaattcaggaacaggaaaaacctttttatcacattgtatagcaaaagatttattagaaagaggttttctagtaatttataaaacctcagcagatttagcacaagagcttaaacagcttcagtttgaacctaatcctactctagaagatttaataataaactgtgatttacttataattgatgatttgggtacagaacagataagtgcattctcaaaaacttgcttctttaatctaataaataaaaagttgctttcgcaaaagaaaatgcttatatcttcaaattataatttagaagaactgacaagattatattcagaaagaattacctctagattatttggcgatttcaccctatgtaaattttatggtgacgatataagaataaatagaaacttaaaaaataaaaagatataaaaataaaactgtttcgataattcgaaacagttttatactggtgctggcaataggaattgaacccataacctactgattacaagtcagttgctctaccaattgagctatgccagcttataatattggcgacttggaaggggatcgaaccctcgacctctggcgtgacaggccagcactctaaccagctgagctaccaagccgcaatttgtggtgggcattacagggctcgaacctgtgaccctctgcttgtaaggcagatgctctcccagctgagctaaacgcccacaaattaatgtttaaaagtgacccgtacgggaatcgaacccatgttaccaccgtgaaagggtggtgtcttaaccgcttgaccaacgggccttattgttttactggtgctggcaataggaattgaacccataacctactgattacaagtcagttgctctaccaattgagctatgccagcttataatagtatggcgacttggaaggggatcgaaccctcgacctctggcgtgacaggccagcactctaaccagctgagctaccaagccgcaatttgtggtgggcattacagggctcgaacctgtgaccctctgcttgtaaggcagatgctctcccagctgagctaaacgcccacaaattaatgtttaaaagtgacccgtacgggaatcgaacccatgttaccaccgtgaaagggtggtgtcttaaccgcttgaccaacgggccttattatggggaatcgcattgcctcgcgacccgacaagtaatataatacaaaaaaaatcatcatgtgtcaacatattttttataaaaacttttatttttatattttttataattttaaaaacttttaaactgttgaaaacagtggcttttgtggatcttataaaagataaaaaatcttactaaattataataagtatatttagcaataatctatattgtttaataaaacccacaacttaacataaattccttatcttaatttcctatattctttaaaacaaatttgtttcttatttatatattgtgatacttcttcagttttatacattatattcgtatatattaagtagaaaaaattaaaaatcaccgaaaatcaatttaaattgttgattacatataaaaaaaacgtttactcggtcattattcaatagtgcaaaaaatgagtttttgtgttatttttatactgactggtaagtacaaaaataacgaagaaaggggacaaatttatgaagttacaggaacttaaatcgaataaaaactttatgtggaaaattattgccatagttactggcgcaatcatgtttattcctatgatgtattcactcttttatttgggcgcattttgggacccatacggtaacttaagtcaagtacctgttgccatcgtgaatcaagataaatcttattcaaaagatggtaaaacatatactttgggcaatgatttagtaaaaaaactaaaagatgatgaaaatatgaaatgggaatttgtaagctataatgaagcaaagagaggtgtcgatggcaccgattattatgccatgatagttgttcctaaagatttctctaaaaaaattgccaattcatctagtggtgattttaaaaaaccgaagttaacatacattgcaaataagggtaaaaactatatattttcccagctatcttataaggcagctgaaaaattagaaacagaaatttcaaataagattacaaaagaaacctcacaggttcttgttgataaattatacgatgtaaaaagttcactaaaagatgctagtgatgctcaaaacaaaatccaagatggaacacagaaactatttaatggcagtggtgatctttcgactggattaaatactgcatataatggttctcaaacattatcatcaggattaaacactgctgcaactggctcacaggcattaaaatcaggattagatactgctgcaagtggttcatctacacttggaaacggaatttaccaattatcaaacggtaatacaacaataaaaaatggtttattctctgctttatctggctcctctaaccttaatgggggattaaatcaactattagacggacaatctcaaatagttaaaggctccaaagatttgctagatggtttaagccaatttaaatcaagtctttcaaatggaagcgatatgagtagtttatctactgctacaggtgctatttctaaaagttcgtcggctatcttacaaaattctagccaaactgctagtaaagctggtgatgctaaccaaaaaatacaggatgcaatggatgcgttgaataaaggagatacagcaactgcattaagtaaactccaagatgctaaaagtgatgcaagtactatacaaagtttaaattcgcctcaagcaccagcaccaaataaagctccagacaatattacagcagccgctactataggtaagatttctgatgctattcctgaacaagtaaaagcttcagtaactgaaactcaacaaaaagctggagctgcagttgatcaatttatcgctggtacatctaaacttaaacaaggaagtaaacaggtttatgatggtttaagttcagctgcctcagggtcaaaagatctttcatccggcttaacgcaactttatgacggttcaaataaactacaaaatggtctaaattcagcttatgctggcagcctaaacttaacaactggtcttaacactgcttcagcaaaaactggagaattatcaactggattaggaacattaaatagcggttctcaagctttaaatagcggtataggcacactaaatactggtgctcaaacattgaataacggcataggaacattaaatgacggcactactaaattaaaagacggattaaatgatggttataatacacttaacaacaaattaaagttcacttcaactactatgggtaactttgtatcaagtcctattagtttaagtgataaatcaataaatacagttagcaaatatggagaaggacttgctccttactttatatccctttcattatggttaggtgctatgtttataaatcttattatatccgtagtaggaatgcttaaattaacaaaaaataaattcttaaacagcttcctaggaaaacttcttgttggagttggtttagttacaatacaatctataatgctgaccttctcattgcaacttgttttgggcgtagacagcgtaaacacagcttacttatatcttaacaatgtgtttacctcaatagttttcttcagcattatgtatggattatccacagcatttggaataatggcaacacctatatcttttgtattacttattttgcagctatctgcctgtgcaggtaccttccctatagaaacagctcctgtgttctatagaatggttaataagtttattccaatgacatacaccgttaaagttataagaatgattcttagtggtataaattattcagacttatctcataacctactaatactactttcatttattgttattttcttagtaggtggatttggaataaaaacattaagattaagtataaaaaagcaggttagttctgaagctgccgaaaatatagcttaataaaaaagagaggatttagttcttctcttttttttatattcgttaaaagcctaatgatataatttgattaataataggcaaactactgatatatagctttaatgtttgttttgatgtaaaatatatatgtttttaaatgtaatagattagttaaggagtgtttttatgaaggttattgtaattggcggcggtgcatctggaataatggcagcaatttctgctaaagatttaggctatgaggtttctatattagagcgaaacgatagaattggaaaaaagatattaactactggaaacggaagatgcaatataaccaatgaaaatattataacgaaacgataccacagcaataatccaaatttctttgaacatgttattaatgagtttacagcggaaaacaccataagtttttttgaaatgctaggtcttccactaatatctcttgaaggtggaaagatgtatcctttatctcttcaagcttcttctgttttagacattcttagaattgcattggatgaaagagatattgaagttattacaaattctaaaataactaaaataatacgaaataaaagctcctttaaaataatttcttcagacggtgctgaatactttgccgacaaagtcatattagcagctggtggaatgtctgctcctaaaacaggttctgatggcttaggaatgactttagctgcttctttaggtcatagattaataaagacagttccagctcttgtacagcttaaattagactttaaaagccttagagctttgtctggtataaaatttgacggtaacataaaaatactagttgatggtgaagaaaaaagatgcgaatttggtgaaattctatttactgattacggaatatctggccctccaatacttcaactgagtagaatagcctcatatgcagttgaagaaaagaaagaggttaaaatagaagtagatatgcttccccattactccagggatagccttaaggcctttctagaaaatcattggggtacattttcttatagaagtgtttacgattcttttataggtattataaataaaaaaatgatcccaattcttttaaaacaatgcggaataatagatattcacaaatactgctttgatttaacttgggaagaaaaagaaaatatatttaattatttaaaatgttggagtttcaaagtgtgtggtacaaattcctactcaaactcacaagtaactgctggtggagttgatactgttgaagtaaataatataactcttgagtcaaaacttgtaccaggcttatatttttgtggagaagtactcgatgtagacggagattgcggcggctttaatcttcaatgggcatggagctccggatacatcgctggaaaatgcttatgatttaataaaatcagtctttattaaagttaaattttcaccttgagaattagttattaagtgattgaaagagcattttccttcactttttttcatttctgttactatatcaatcgtttctccgtaggcagtttccttttgatacataaccttcaaatctgaaatttcataatccttcataacctccaaaggtatattttcaagaacccaagatacatactttacattattcacatgcctattagtatctatatcactgtatcttaccttaaatctattttcaaaacttacttctttaggtttacttagcttctcaaaaggaatttgctcatcatcttcctctgtgaggttatatattttatatatctcttctgttactctacaaggtcttcttctctctgtgtcaattaaaaaccataaagaattagcatatcctattttttctcctttgttaaatagctcatattttctataagcatagaatttccttatggaataaggtatagtagccacctcaattgtatcaccaagttctggatacttgtccatatgaatctcccacttatatactacccatgcaagcttattatctattagatattgtacactcataccaagattatctgtttgataggtagctatatcttctaagtaactcattatcgacgtaatagttgccttccctttaaagtctacttcgtaaatatgggtatcataatttcttttagtaacaacctttgacaataatatcacctctactatataaattaaaaagtaccatcagaaaacacatgacggtacttttttaataacattattagttattttcttctttactgtaatttaagctttttattatttcatcagcatctataccatgaaccattgcagcttcttcaattgtttcaccaagagctgaaggacagcaaacgcatcccattccgaaactcataagtatttcagctgcaccgggatttttctgtataacttcgccaatagtcatatccttagttaccacttgcatctacctcttttcgttctatagtaatatagataagtaatcctaattgattatgattattaattatctatgttttaattatacattagtttcccctgttgtcaaaagattttttatccataaattctaaatgatgtattgttatttatatgtctgaaacttcaatagtatgatttctttctggtccaacagaaactattgatattttagtttctgtaagctcttctatcctctttagatatttctttgcattaagaggaagctcatcataacttctagcatcagctacactttcatcccaaccatcaaactcctcgtatataggtttgcataaagctaagtcttcaaggctagctggaatataatctatagtcttaccattaaaatcatatcctatacacacttttaccttatctattcctgcaagtgtatcaatttttgtcattgcaaaacttgtaagtccggaaaccctagctgcttgctttaatataacagtatcaagccatccacatcttcttgctcttccagtggttactccatactcaaatcctgcttctcttatcctatctcccatttcatcaagaagttctgtagggaaaggtcctttaccaactctagttgtgtacgctttagctattcccactgcactagttatcatagtaggtcctattgctgctcctgggcaaactcctcctcctatggtatttgatgatgtaacatatggataagttccgtaatctatatcaagaagatttccttgagcaccttcaaataaaaccttcttaccattctttatttcattataaactataacagaggtatccttaacaaatggttttaatttctcaccaaatgcaaggtattcttcacatatttcattatagtcaaatgcatccataccatatactttagtaattatagcattctttatttctaaatttgattttaacttttccttaaatacttcaggatgaagtaaatcacatactcttattcctgatctttcagctttgtctgtataacaaggtcctatacctttaccagttgttcctatatcattttttcctctatgtttttcgcttgctccatctagtgctctatgataaggcattattaaatgtgctctatcactcacaattagattttcaggagttacttctactcccattcccttaagatactctacttcttcaaacatagcttttggatctagaacaacaccatttccaattacattaactttatttttatataatattccagatggtattaagtgaagtttatacttcttatcttctacttcaacggtatgtcctgcgttattaccaccttgaaatctaacaaccacgtcagctccttgtgcaagataatctgtcatcttaccttttccttcatctccccactgggcgcctaaaacaataaatgctgacataaaaactcctcactttcataatttaaaaattgctatagaaaattaccaaaactaatataccataaaaaaagtaatttgtctttattttcgaagcaaaaattcgaatattattgcttattactagaatattgttcgtatgatttgcactaaatttctcttttttacattccttcctaatagtaccttgttataaatatccataacgctttttccaaagttctccgtagaatattcacacgacttttgttttgcattagatataatttttcttcttagtatttcatttgattttaaactctctactgcctttacaaactcacttgtatccgtatatgcaaatccagtaaccccatttacaattaaattcttaatgcatggatcccatttgcatataactggacatccgctcgcaagcgcttctatataagttaatccttgtgtttcactttgagatgcagttacaaatgcaattcccattttataatatttatacacttgatcactatcaaccatccctgtaaacttcacaatatcttctattccgtaccttgaaacaagctctttcagctgtgaaagatatggccctccaccaactatgaggagcttaatatccttcaattcatttaagcccttcttaaataaatttattatttcatctatatttttttcttccgctacccttccaacataaactaaaatcttatctttagttttccatccgtaatgatttaaaattttttctctctctttacttgataactccttttgaaaagattttatatctattcctgttggtacaatctttatatctttatagacctcgtactctctaagaacattctttaccttttcagttggagctatgatttcgtcgaaggtatttaataaaattttcaacaatttagccattgtacctttacgtataaccttaccacctaaaaagtatttaagataatcttcgtacattgtgtgataagtatgaacctgaggtatatcaagctttctctttatatatttagcaactaacattgtagaaaattctgtctgcgagtgtataatctcaggtgaccattctactattttacttattactttatttccaaatggcttcattattcttgcatctggatatacttttacaaagtgggaatttaaatagtatatatcaccctctatatattctcttccgttataggacaaggtaagaattctaacatcgtgccctgccatttttaattgcttatataaattattagttgataccacaactccatttatcatggggtaataagcatctgttgttattaaaatcttcattttaccctccattttagctttaatatatgaagtggtatgttttagaaatatgttttaagaattacgtactataactataccttatttttattttacctatacttctcagcaagtattcttgctatataaacgccacttgctgcagcttgggatagtgagtgcgtaacccccgaaccatctcctaaaatatataatcccttaatctttgtttctagattcttatctacttccactttagaattataaaacttaacttctactccgtaaagaagagtatcctcatttgctgttcctggtgcaatattatttaatgcatatatcatttctattatgtcgtctaactgtcttttaggaatgactagccctaaatcgccaggagtagccttaagagttggggttgtaaaactcttctccatcctatgttcattggttcttcttccattaactaaatcaccaaatctctgaacaagcacacctcctccaagcatattactcagcctcgcaatagatgcaccgtattcattgctatcctcaaaaggttcagtaaaattattcgttactaataacgcaaagttagtattttctgtgcgaagttctggattagcataactatggccgttaactgttattattccatttgtgttttcattaacaacctcaccataagggttcatacaaaatgttcttaccatatcattatacttctttgttttataaactattttgctctcgtaaacagcatctgttatatgtgaaaacacttctgcaggaagttctacacgaactcctatatccaccctattacttttggtttttattccaaccttagcacacatatcagatatccatttagatccagaacgccctgtagctaaaataagctccttagaactaaaggtcttattagaagtctcaatattaaataattcatcacctttatatatatttaaaacctctgtatcaaagattatatccattttatcctttaaaaaatcaaaaatgtttgccattataataagatttctatctgttcctaaatgtcttacctttgcatcaagtaaatgcaagtcatattggagagcctttgcctttagtttagaattttcagttgaatatagcttagcatcttctccccccatactacatagaacgctgtcaacatagttcattaagtctattgcttcttctgctcctacatacttgtgaagatctcccccaaaattatttgttatgttatatttaccatcggataagcttcctgctcctccgtaaccattcataatattacatacgctgcaatttatacaagcttttattttctttccatcaatagggcactttcttttttctaagctatgtcccttttctatcattaatatattaactttcggatttttctttactaattcatatgcagtaaaaataccgcttgccccagctcctacaataattacatcataactcatgtataatcttccccctccattttatgcctctatctttcatcttaacaaagcactttaatgtagtcaaataaactttttgttgaatttaaacattattatttgtaataaactattgaaattttattcatttcgtgataaaaagtatttatcctcatattttagtttgtatatgtaaataatattctaagaaatattagcaagaggtggtaaacatgaatataccaaacttactcacccttttcaggttttttttaataccgtgttttatatttgcttttttttctcgttcaaatgattctttaattaattcggcaataatattttttatagctggttttactgatatattagatggatatatcgcaagaaaatttaatgaaataactaaatatgggactgtaatggatcctctagcagataaactcatgctcttaacagttctatgttgtttaactataaaaggctacataccattattaatattgctaataatgctagcaaaagaattttctatgattataataggtgtatttctctacggtaaaaacataattattcctgctaatatatggggtaagttatcaacccttattttttatgttgctattttgttttttacatttagcaagttcctaggaacttatctattatacatagctattcttggtgctgttgttgcctatataaattactttttgatttttttatcaaaatacagacaaaatgctaccaaataaaaaggtttctcacggaaaggaagcgagttttcactgcttttccaagagaaaccttttaacttatatattattatttcctatttgaaatatctgtttaataaacctctgaaagcagaaccgtgtctagcttcatctttgcacatttcatgtactgtatcatgaatagcatcatagttaagctttttagctaaagttgcaagctctttctttccttcgcaagctcctttttcagcatcaactctcatttgaagatttgtcttagtatcagctactacaacttctcctaaaagttcagcaaactttgaagcatgttcagcttcttcaaatgcaattctcttatatgcttctgcaacttcagggtatccttctctatctgcttgtcttgccattgcaagatacatgccaacttctgtgcattctcctgtaaagttagctcttaagccttcaagaacttctttatctacacccttagcaattcctattttatgctcatctgcccaaccttcgccttcatctttaacttctacaaatttatcttttccagcaccacatacggggcatttttctggagcatcctctcctgtatagatatatccacaaacaacacatttaaattttttcattttcaatttcctcctttaatctctttcacataactattttcatttcactcttatatttttgctaatcttattttctatttaaaatatctatttaataaacctctgaaagcagaaccgtgtctagcttcatctttgcacatttcatgtactgtatcatgaatagcatcatagttaagctttttagctaaagttgcaagctctttctttccttcgcaagctcctttttcagcatcaactctcatttgaagatttgtcttagtatcagctactacaacttctcctaaaagctcagcaaactttgaagcatgttcagcttcttcaaatgcaattctcttatatgcttctgcaacttcagggtatccttctctatctgcttgtcttgccattgcaagatacatgccaacttctgtgcattctcctgtaaagttagctcttaagccttcaagaacttctttatctacacccttagcaactcctattttgtgctcatctgcccagccttcgccttcgtctttaacttctacaaatttatcttttccagcaccacatacagggcatttttctggagcatcctctcctgtatagatatatccacaaacaacacatttaaattttttcatttttaatttcctcctttaatctctctcatatatttatatagtattttagttttatatattatatttattacttgctctccatattttgctaacttctcttgacaattgttattatataataattattatttgtttgcaatagtttttttaaattttttctaattttttctttaaatatgtgtaatatatcgcttatatggtaatacatatttagccttttccctgcttattgccacactttacaaactatttactaataaaaaatattactaaatttcactatatcaacttgtaaactgttttaaagttgaaacttaatttaatgtatgataaactattgataaaattaaattcttacctagggtaaaggtgctgtagttattattatttattcttagctggcaagctttgagggataaagaaaggaattgcagccgaagaaggatttccggcaggaactttttctggttttgtataaaatatatgcagaactgtcactattcttttatagtggagagctacaaggtgcacgtgagatgtttataacaacagcaaagtgttcctttgctgttaatttttttgtaccaaataaagcccctggtaagggaaagagggattaaatgaaaatcgaaggtgttttaataccattaattactccttttaaggatggcaaagtagatttagcttcttatgaaaaacttattaggcactattcaaaaaaaggagtcgctggctttatgcctcttgcaaccacaggcgaaactcctacattatcagattatgaataccaaagcatattagaaaaaactgttgaatgcaatgaacttaatcttcctatatatgttggttttggcggaaataataccgaaaaaatgaccaaggatatcaaaatgcttgataaatataatattaaaggtattttatcagtatgtccttattataatagacctgaccaaaggggaatatacgaacattttaaaagaatatctgaatcaacttccttagatatagtattatacaatataccttacagaaccggaagaaacatagaaaatgacactataagaaggctttctgaattagataatatagttggagtaaaggatgcttgtggtgattttactcaaaccacagagcttttattaaatcgtccagataacttttcaatacttactggcgaagatgccttcttctacagcacactaatgcttggaggagatggcggtataatggcatccgctcacttaaatactgaaaaatacgttgaagtatttaataaatctaagcaaaatgactataaatctgctctagaaatctggaaacaagtagctaacatgattcctctgctatttgaagagccaaatcctgcaccaataaagtactgtctctcaaaaacaggagttatagcttctgaagctttaaggttgcctctagtacctatctcagaaaatctaaaagaaaagttaaataaatttttataatagttatccacatttatgctaaaataagaggtataaatgtggatttttttttataaaagtggataacttttaatattttaattgaaattgaaggtgattataatgacagaaaataaaatacaaaaattaacccctctagcagaaacaaaatttctaagtctttatgatattgaatacaaaaataaaaaacaagatacaagacactggactgtagcttcaaggaaagattacaaagctcttagtgatcaatatcttaatggtgctgctgaaaaaaccgatgcggcaataattgcagcttttcatgaagatacacacaaaatagtctgcataaaacaattcagagtacccttaaacgactatgtttatgagcttcccgcaggacttatagacgcaggtgaagattttgaagcagctgctcgacgtgagcttaaagaggaaacaggccttacacttttggatataaactatgaaaaaagtaaaaagcgtgtttatgcctctgctggcatgactgatgaatctgcagcaatgatattttgcacctgcagtggaaccttatcaaaagattatcttgaagatgacgaagatatagaagttatgcttctttctaaaaatgaagtaaaaaaattattaaatgacgatgtaaaaatggatatgagagcttttataactcttcaagctttcaccgaactcggcgaaaaactatttaaatagaaggaggttatactgtgattgatattgtaagtaatgttattaaagaaatgatattatattttgatggagatgtacgacgcataaaccatgctttaaaagtttatagcttttcaaaaacaataggtcaattagaaaatatacctgaagaaatgtttaaaattcttgaggttgctgctgttttgcatgatattggtattaaggaaagtgaaagaaaatacaattcatctgccggaaactatcaagaattagaaggtcccgctgttgccaaaagccttttagaaaagtttaacttagaagatacctttgttaatagggtttgctatcttataggtcatcatcatacttatactgaaattgataatttggattaccaaattttaatagaggctgatttcattgtaaatatattcgaagattccattcctaaggataatgtcgatatagttaagaaaaaatacttcaaaaccactactggagtatccctcatagacagcatgtataaataattctaaattaaatccagaggtgataaattaatatggaagatggtagaacaagcgacaaggtactagaaaaaatccaggaaaaaatctttagtggagaatggaagcctggccaaaaaattatgtcagaaacaaaactagctgaagatttaaatgtaagtagggtatctgtaagagaagctattgaaaaattagcagcttttaatatagtaagtaagaagaaaggtggaggcacatttataaatgatttaggtccatccgtatacttaaatagcttacttccaatgctgattttaaatagagataactatttagaaatattggaatttagacttattacagaaccagaatctgctaagctctgcgctgaacgctgtgatgatgagcttataatttctcttgaaaaaatctatgataatatgaaaaattataaagatgatatacaaaagttcactaaggaagatttaaattttcacacaaaaatagcagaaggtactaaaaattcattaataataaaaataaatgagcttcttatgaatatacttgaataccatcaaagaggattatacgaaacattgggtcctaaaggtggtatctgtgaacataaatttattctagatgctataaaaaatagagattctgaacttgcctttatatattcaagaagacatgcagaaagaacaataaatgatctaaagaaactacaaacctaaaaagcgcaaatgtgctttttaggtttttttattatttaaatagtataaccttattaatcttagtataacttaaaattaaattttaaaactctattgacttagaaacgttttcattgtattatactattaaagttgtaatacaactttaatagtataatgtatttttacagcgttaagtagcttattattatattttatcttaaagttgtaatacagattaagattatgaggtgatttaattgttaaaaagtcaggaaataagacaaaaggctcctgagcttgattcccttagattaggttcaggatggaaatctgaagaattgaataaagcacagattataattgaaagcagttttggtcatagtcatcctggaagcgcccatcttgatactttagttgatgaagctttcaagtcaattgatgacaatggaggacggggggctaagtattttgttacggatatatgcgacggtgaaactcaaggtcatgatggcatgaactattctctcgcttcaagagatataatgacaaatcttatggagatacacgtacaagcaacgcctttcgatgcaggtatattcatagctagctgtgataaagctgttccagctcacttaatggcaattgctagacttgatatgccatccatactagtcccaggtggtattatgaatgctggtcccaatatgcttactttagaacaaatcggaacctataatgcacaatatgaaagaggagaaataacgaaagagcagtacgaacactataaacaaaatgcatgtcctagttgtggcgcctgctcatttatgggaacagcctccactatgcaggttatgtctgaagcccttggtatagctcttcctggaacagctctaataccagtaacctcaaaggaattaaagctagcagccaaaaatgctggtaaacaaatactcaaacttattgaactaaatataaaaccatcagaaataatgactaagaaagcctttgaaaacgcaataatggttcatgccgctatcgcaggttcaagcaattgccttcttcatattcctgccatagcccatgaacttggcatggatatagaacctgaactatttgacgaaatccataaaaaaatcccatacattttaaatataaggccaagtggtttttatccaggttcatacttttggaatgcaggtggagttcctgcaataatggaggaaattaaagagtttttacatttagatgttatgaccgttacagggaaaaccttaggagaaaatttagaggatttaaaaaacagtggatattacgaagaacatgataaactaataacttcacttggaataaaaaaggaagatgttataagaactaaagaaaatcctattcaaagtcaaggcgccatagctatattaaaaggtaaccttgcaccaggaggcgctgtagttaagcattctgcaatatcaaagaaactaatgcaggttgtcttaaaagctagggtgtttaattgtgaagaagatgcgattaagtctgttctaactaaaaatataaagcctggcgatgccgtatttgtaagatatgaaggaccaaagggttctggaatgcctgaaatgttctatactacagaagctatagcctcagatcatgaattagtagactcaactgctttaataactgacggaagattttcaggtgcaactcgtggtcccgctataggtcacgtttctcctgaagcaagtgaaggtggaccaatagcttttgttcaagaaggagaccttataaaaatagatattcctgcaagaaagcttgacataataggaacaaacggaatagaaaaaagtgaaaaagaaattgaaaatatattaaaagaaagaagccaaaattgggtaaaaccagcacctagatacactaaaggcattttaggtctttatacaagatgtgcttcatcacctatgaagggtggatacatggaatagtaaaaaactttatgttttaaacttgcaatgatagctacaaataactatcattgtgagctttacataaaacaattatgcgaattttcaaaatttaaggaggaatacatatgccattattaattgttgttattggcgtcgcattactattactacttatgattaaattcaaagtaaacggattcatatccctaattcttgtagctttggttgttggtatcgccgaaggtatgaatcctgcaaaagctgtttcttcaattcaaaacggtgttggaagcaccttaagcagtttggcactaattttaggttttggtgctatgtttggaaaattaatagctgattctggtgctgctcaaaggatttctagaagtttaattaataaatttggtgtaaaaaaaattcaatgggctgttgtattaacgggtttcatagttggcattgctatgttctatgaggtaggttttgttctacttatacctcttgtttttactattgctgaattcacagaacttcctcttttatacataggcgttcctatggctgcagctttatctgtcactcacggatttttacctcctcaccctggacctgttgcaatagctacaatatatggtgcaagcattagcatgactcttgtatatggaattgtaatagctatacctacagtaatagttgcaggacctgttttgactaagtttttaaaacgttttgatcataaatcttcaaaaaacctttttaaaactaaggtctttgatgaagatgaaatgccaagtttctcattaagcgtattaactgctattgttcctcctattcttatggccttttcagctgtttgtgaaatcacactaccaaaaacatctcctataagacattttgcagaattcgttggaagtcctatgatggcaatgtttatatcaatcattgtagctatctttactcttggtataatgcgcggaaagaaaatggaagaaataatgagaactttagctgaagccgcaagttccattgcaatgatccttttaatagtagctggaggtggtgccttcaagcaagtactaatagacagtggtgttggaaaatatatcgcttctattatggttggaagtaatatatctcctctaatcttggcttgggcgattgcagcaattttaagattatctcttggttctgccactgtttctgctatgactactgccggtatagtacttcctcttattccttcaacccatgcaaacccagcattaatggttttagcaactggcgcaggtagtcttattttctctcatgtaaacgatccaggtttctggatgttcaaagaatattttggacttagcataggagaaacaatggcttcatggtctactttagaaactataatttcaattatggggttaattggtgttttagctttaaatatggttggatagataaaagcttgttcctgagtatggtagctctagggacaagcttttaatttatatttaatcatttgcttttagcctacattatagttactttataaaatcaaacgtatcctcatctgcatctaaaatctttataagtgtttctttaaatgcagttaacttcaaggacatatcctcctttttccacttaaataaatcctcatccaaataaaaatgtgaaagcgttaatataatttctgctgtttcaagtggatactttaccttaaaaactccctcttcattaccctgtgatattatatctgcataaatgggagcaaagtattttataatagccaccattaatttttgatgaaatattttatttgatggactgttgatttctttaacttgttcgttaacactagtaatttttattcccgctaagagtattttctttaatctttctatagaatttaacccttcttcactttcctttaaaacctcgttactaaaaaaagctactctattttctattgcagcatctgcacactcttctttagaagaaaagtaatgatataaagctcctttagatattcctaacttattaattataaatgcaagtgtggtattttcataaccatttgcaataaatatatcccatattttatttgccaattcggtccttttattattaaaatttatatttgttctagacatgacgttttacctccattgtataaaccatctgtcttagattgtattaaaaattaaaattaacgtcaattattaaagtaatttacttatcatttccatattaggaatactcatatttaaatcttttcctgttttaagcattcctttaaagttatccttcatttcatctatcgcttttaatgcatgcgcagtatatcgctgcattattggatttttcttaaagttacgtctaaacattggatagagcagaaaaaatggcatagacatcatttttacttctggataatcttttagattgacaccttttctttcacatattttgtacccttcaatcatagctctaaagcatatttttgttaactttttatcctttaaaagctcatctaagttattatattttgagagtccaaccccaagaggggccgagccaacattatgcacccataaccaatgaagtatatttgatggtatctcaggttcaattctgcagtctttaaaagctcttactacaacttctaataatggtttttgaacttcatatacgcttccaagggatatatcattaccaatattggcccaaagtaaatctcccttaaaagttccaccccctccagcatagcccataatatattgttcttttcttaataatttatctatttcgtaagttcctccccaattcaaagtaaagattaaaaactttgcgttagatgctttcttaactaatgtcttaattgcctcctctaattgataagtatttactggaagtattataaaatcatagttttcagttacttctgtgacgcatttatacgtgtattctccttcagtattcatattctttttatcattgcgttcatctataatgtcataaggtatcgtcttaccattcataaccttcatcttatcctctctaacaaaatgagtaacatcatgatgttttgagagtgcatatgcatatagtgtgccaataacacctgtacctaatattaatattttcatattctttcctcccaatattaaaccgactgttggtttaattatatattaaaaaaatattacattcaagttattaacaaattaaaacatatgttagcatatcattatagcttcttttaataacttaaaaaatatagctagcgaaaacttatttaatttatctaataccaattataaataaaattacaggagttacttctttgtttaataaaatagattccaataatatagaataactctacctaaaatatttctttaaaatcaaccgttataatcaatctttcggttgatttgtttttttgtcacaaatgatactataaaattacacttaaaccgaagggagataaaacatggaaaatataattgaagttaaaaacttaaaaaagagttataagaacttaactgctgtgaatgaaataagcttttatgtaaaagaaggtgaaattctaggtttcttaggacctaatggcgctggtaaaagcaccacaataaatattctttcaacagcattaaaatatgatagtggtcaaattaattttatgggtaaaccaattaaagatgacatgataaatataaaaaaaaatataggcattgtaccccaggatttagccatatatgaagatgtaagcgcagagaaaaatgtaagattctttgcaagtctatattccctaaaaggtaatgctttaaaagaaaaaactaaacaagcgcttgagttcgttggtttatatgatagaaaagatgataaacctaaaaccttttctggtggtatgaaaagaaggctcaatattgcttgtgctatagcccacaatcctaaacttataataatggatgagcccaccgttggaatagatcctcaatcaagaaatcatattttaacttctataaaaaagcttcaaaaaatgggagcgactataatatatacaactcactacatggaagaagttgaagaaatatctgaccgcataataataatggatcatggtagcataattgcagaaggtacaaaagaaaagctaaaggaatctattgaagatgaaaaagtatatgtaatatctgctgataatactgatgcccttaaaagtactgacttctttcaaattgagggagttaaaaaagtaacaatatctaaaaactctgtggaaataatctgtctaaacactgtagaaaacttagataagataatcataactatgataaacaaaaactgtaaggtgagtaatataactaccaatacctcatcacttgaaagagtatttttaaatcttacaggaaaaagcttgagagactaggaggattttttatgaatttattaaaaataaccaaaagagattttattaatacagccaaaaatcctacattacttctttgcaatacagcttttgcacttcttttaataggcatctttggctttataacaaaaaatagctatggaaacactgtaacttcatatgattattatggaataactatgatagtatattttatttttatgattcccctaaccacttcaaacacctttatggagaaaaagataaagcctggtaacgtaagacttgtttattctcctacccatacctctatcatttttttatcaaagatactggcgtctttcatatttgcaattttgtgttacacctgtttgctattgatggaaatttatcttttaggcataaacgttggagggcataactttatatacctcatagtaattgttatattttttacattcgccttatgctgttttggtgcttttatgtgctgcatttttaaaagtgaggaagctgcaaataaaattatgtcacccattataactttattctctatatttggaggtatgttttttccagtagacagccttggtagtgctgtgaagcttctctcctatctctcccctgcaaaatgggttactgagtgcatattcaaaataatttatgataataacttctctctgtttttaccatttatattggcttgcatagtcatttctttaatttttattttcttatgcaaaataatttttaaaccggaggaatatatataatgattataattaatatatttaaaaataatttatctagactactttgtaaaaaagctatactactgacatccattatttttattcctctcatgataataggtggtgtatactttacttcaaaaatggacaccaaggcaaatatagctatagttactaaaaataaaaatataacctttaataacaagtatgttaaaataacaaccttaagtgaaaaaccagctttatcagagcttgttttgaataaatacgatgctgtagtcacttattcagataatatccattttaaaatcaccacaataaaaagcaataaactaaagcatgaacttaatacatttttaaaaaatcctaaggcaaaatctaattttaaggaagctagtgcaggaactcgcggcacaggaactaatatactaggttttttgattctactacttgcaacgcaggaaattcagtttatgctactttatcctgaagacagagatctagggacctttagaaggatattaatttcccctacttcttttattaagtatttgcttagtgagggtatctttgattttgtagttgcattcattccatcctatatagctatattaattactaaggaaatttttaaggttactataggttttaattatcttgcgttagctggtctactttcattattattaatctttggtacttcctttgccttattaataacctctattatagatgatgttgacaatgcggccatgctcggaaccttcatcgtacttctatgctctattttatctggaagcttctactcctttactgacgataacaaaattctatctgccatagttagtgcaattccgtataagcagtatttaaccttatcacaaggtatcgaaagtggtagaagtatttctaattactctagtcaagttctgtatattatatcaattactttggttttcttcattctaggaactttggttacaagaaaaaatttgcaaaacggaaagtactagcttgtattattaattcttagattatagaatataagtatcaaaattggattcaagggtgattaaatgaataataatttaagatttataaagacaaaatttgttattccttctccaaggaaaaactatataaaaagagcgaaacttataaatgaattaaataatttatttgactacaagcttatagttataaaagcccctgccggtagtggtaaatctacactagtgtcatcctttataaaggagaaaaaactttctaacgttaaatggataaacctagatgaaagtaataatgaaatttattcattctttagttaccttatttctgcattatcgccttatcttgaggataaaacagatgctttaatacaatccattagctgcatgacgaaaaaagaagatatccttgagataatatcttttttagtaaatgaaatttcttcttatgaaaagcctattatactcgtatttgatgactatcactatatcaaagagccatttttaaattctactttagagaggcttataaaatactctccaagcaacattcactacatttttatcacaagagaaagcctccctatttatcttggagaaatgagaattagaaatgaaatcttagaagtaaatgaaaatgaactaaagttctcaaaaaaggaatgctctgattttataaaaagtacactaaacactcctcttgagtcttatgatattaataaaatttatacaatttccgaaggctggataggtggaatacagctaacctcattagcctttaaaaatagtaaagatctttccataaaggtattaaacaaatacgtagttgattaccttacagaagaaatattaaaaggccttagcaactctgaaaaagactttttaataaaaacttctattatgagctatttcaactctgagctatgtaatgagattttacaaatagaaaattcagatgaaataataaattctctcttaaataaaaatctatttataataacattggacgaggaagatggtttatttagatatcatcatctttttaaagaattcttgaatactaactttaataagctacctgacagtactagaaagcaattccacttaaatgcttatacttctctaaaaaacagtggagatattagtgaagccattattcacctaattaaaataaaagaataccaaaaagcttcctctgagttagaaaagaatattgaagatactagctgcatttctttaattagattgatcccattagatgctttaattaatagtaatgagcttattattcaaaagatcttttaccactattcaaatatgcaaattgatgaatgcaaaagtattattagctatttagagagctttaaaaagcctgaacttacagcccttgcaaatatatttaaattatatgtatatgatttttgtaattccatgaccctggaagatttaaatattgttaagaccttcaagctaactgatattacaaaagcaatactatatttaaacatctcaccagcctttatgattcaaggtgaatatgaaaagattttatattattccaaagaaagtgataaaatagctaccaaatataatattgtatttttaagtgtattttctaaatgtctaatagcctccgtactagaagaacaaggtaagctttctgataccttaaaagtctataatgatttagataccttgatagagaagaataaatttattagcggttttaaatttctggtacacttaggggttgctggagttcatatgaaaaaatatgatcttgaaaataccgaaaaatttttaaacctatctttaagtggtcttaaactaaactatccttttataagcagagctatactttacaacttaatggaattgtattttttaaaaggagaccttgaaaaaggtagcctaacgaaaagagatttggtagataattatttaaactctcactcccttttaccttgccaaattcactctgccaagcttaaatacactttaccacaaggtaattatgaattagaagaattaaaagaatataaatctttagtggaagatacaataaatatgtcacatatctatttaacacctgaagacaatgttgtttattcaagagtactatttattcttggtgaaaaagaaaaggcactagctcttttagataaaaccttaaaggattgcagacacttatcaatattaattcaccttgtagaaggccttatagttaaagctctaatcttaaaagaagattcaaaagtccaaaaaagagaattgtttaatgttttaagagaggctctacattacggtattgaaagtgaatacttaagagcatttattgttgaaggagagaaaattttaaaaataattaagcttcttcaaaacgatgtagacataactctaacaaaaaaggaaaagaacttcattgataagatatacaaattagtaactcctattaaagaatgcattttaagtgaacgtgagcttgaggttcttgaagttctttgtgatggaaattccaacaaagaaattggcagtatattaaacatttccctttctactgtaaaaacacatatgataaatatatattcaaaactacatgtatcaaacagacttcaagctgtagaaaaggcaaaagaacttaatctattgcaaagataataaaaaaggttgctaaggctactgcaacttctcatactaaatatgataaataactctcattgtcatcaccagcttttgctggtgttttgttttattatacaattatttttaaatatccatgaataagcattataatcggttgatcctcacaatagaaaacgttttttcgccctcctccctttttttctatatattttaatcttttcaactatattcatttattgacaattttattcataaactctatgatttatataggcattattactttttttgtataatattgcctatataataaaaattaaatggaggtattttaaatgaaaaatttgaaaaaaaaattattgagcgcaggagtaattttatctgttacattaggtgcttctttaccagtacttgcaaataactatgttacttctgattattttgtatatggcaatggttcaaactggcaagcttcattaacagtagaaccaggacaagctcgtacaacaacatatgcaaatccaggaacatcagtccatgtatatacaagatgtacagctagtaatggaaatacactaaatgcatttggtgaaatgaatggagctaacgcacttgttgcaactacaggatacgttaacggaactgcttggaatggataccacggtgtttatgatttgaatggaactgttcatgttgcatctccagccgatggggaattctggcaataactttgtatatgcgttaaatatatatacaaatagtaaataaatatatttgaacttatatttatagaaagctattgatattagtaatgctatcacagaaaagtactatataacattgtacctttctgtgatagcataaatatttttttatttatatttaaactttggaggtttatcaatgaagaaaaaaattcttattttattagttatattaattctaatactaactagtgtaggatgtaagaaaacaataccaagttcgcgtaatgccaatatttcaaccctaactaatactcaatctaaaagaaaaataagaactgcgcaagctggattcgtatttaataactctagcgattttaagaatgatatatataatcttaatactgatattatagatggaattttcaaaattaatattaatataaacacagaaatgaacttattagtaatgattgattatcatccagttacctttaaagtaaacggtacagaaacttccttatataaatttataattaataacaaagaacaagatatacctttaagcgttaatacccagggattaagcaatggcacccatcttttatcctttgcttattatgctaccaaagaaatcacaaattttaattccttatttatttcttacaaggttattaaagcatcctctgaaggttcaattaagattaacgaaaataaattaacacaatttgaaatcctaaataaagaatatggatttatgaatatatcaaaggaaaatttagaagataagaaatacaataatagaattaaacagataattgtaaaaaggggagaagaaacatatatacctcttgtgtgtggtggttgtagtaatcagagttcatatgcttttcaatttctattaaatggtcaaatatattctatagatgattcagaatacaaaacagtagatataccaaagggcaaatcattatataaaatggtgaaaatcaaagcaccaacacaaccgggcagctatcacggatttttcgtttgctatgctaatccattaaatactaacaaattttatccccaggcatttttggcagataaaataaatattattgtggagtaacgtatatgaaagagaaaaaatcgtttattttactatggggtggctatattataggtttcatagtattgttgcttgcacttaatgcatatgaaggtgcaaaatacattgtatattctaggtataaagacaatccaacaataactagagagattcattttggcagcttacagagtttgaaaacatcgactgtaaatgaaatttgtaatatgttaggtcaagactctaaaattcatatagatagtataaattattttgtaaatgtagaaaattcacataaacaaaaaaatcgctataaagtagactttcttaattattctaaggataacttcttcaaattcaaattaaactctggaaggtattttacagtagatgaaatgaaaaataatacaaaagttgttttaataaaccaagaagtatataagtttctaaagatgagtagtttagataattgctatattactattaataacgacaagtttaaagtaataggtgtattaaataatgtgggaacatatatatacctacctgttaaaaacttaaacgtggtaaatctaaatgatgctaatggtagttatttctactgtaatatggatgtagctaatttgaatggaaatatagataacttgtctaaattaattgggaaaaaattacaaaacgagtacaatggaaatatatcaatattagttcctgaagaagaagtagctggtgatatcgctattacctataaatctttgtcactgttttctatagccatattattagtatcaataataaacagtagcagtttatctctaatctggatacataataagtcaaaagaaattacaataaaaaaatcattgggtgcgcctaatattatattgattattgagattgttaaaatgctttttataatttcacttttatctattattatagggattgttttagattactttttaataaacaacgttattagtagtatacaagaactaaatttaattttaaattatgaggtagttattaaatctatagtggtatcttttgtagtaggaattttatcttccattacagcagtcattaaaattttaagatttaatattgcttataatctaaagactaattaggtggtttttataatgattgatttaaatatgattattaattcaataagaaaaagaaaattagcaaattgcgttatcatcattcagtttactatagccttttttgctttaattatttcaattggactagttatggatattgtaaataaaatatatatggcaagaaaaatggccaatttcaattcatacatacttcaagataatggagataatatattagctaagcgagagttttatgatgagttgaaaacaaaaaaaaatgtcgattcctatggcttttatttttatcagagagaatctataaactacttaaatattagtgctgggatgttaaatatgtttaattttaacgttaaaagtggaaaaaatttaagcaaaaaagatttcaaaggaaatggcgaaatttcggtaattattacaccagatctcaaagaaaaatatccagttggtactactcttaaaagacaatatttaaatcaggtgattacatataaggttgtaggaattgttgataattcatttaagttttggtataaatctgacaaacttgtggagacacctaagaacactataatatgtccaagtaacctggatgattataatataaatagcgctaacattattatagctttaaaagatacacacaaggttaaaaacttggaagatagttttaaaaatatacttaataacaccaataaagatgctagtcaaatagatgatacgaatagtcaaagaaattcaataattaatttaagaaaatatatgctttcagtcgtacatgaaaaaattcaaactatagtatactctatatttttttccataactatagtatttttatcagttacaggattgataattaatttaagtcttcttttaacgaaaagattaactgagtttggtataagaatctccttaggagcaactataaaagatatttcaaaattaatatcagctgaattattaattgattttataatagcttatattatatccattatacctacagtattagctaatgtttatcttcctaaaagtggcggcatattgattaatttatggagtctatttatagtctttgtaataattctgttttttacctttttaattttcaaaaatatactaaggatactaaaaaagtatcaaccaatagagttaattagaggtgcttaatatggacattattaaactaaaaaatgtatctaaaatatatactgatggtgataataagttatatgcattaagtgatattactttatcaatccaagaaggagaaatgctagcagtgatgggtgcatctggctcaggtaaatcaacattgttaaatatattaggatgtattgattcattaacagaaggcgaatattattttaagaacaatttagttaatagtaaaaaaagcgttgaattatcaaagttaagaagaaacgatataggatttatatttcaaaattattcactaatacaaaaatataatgttgttgagaatgttatgctatctcttcaatataaaaatctttctactcataatcgcataagcaaaaaagaaataaaaaataaggcgataaaaactcttatagatttaggccttaaagagaaactttataagttgccatcaaatttatctggtggtgaacaacaaagagtagcaatagctagggcattggttggtgataaaagagtaatactagcagatgaaccgactggagctttagataaaaagaatggacagcaactaattaatattttaaaaaaagtaaatgaactaggtgttacgcttgttattgtaactcacgataaaactgtagcaaataaatgtacaaggactatctatattgaagatggaaaagttgttaatagtatttaatattttatgcataaataatatattaaaaattcacgattataaatttattgacaacattaaaaaatcttgttacaattaatgtaatttaagagtaaatcctttgataaggaagagtagccatagaatttagttaaagagagctgagggtggtgtgatctcagtacaataattgttggtgaatggaccttttaggagtaaatcgaaatccaaacggagagtagtggttaacgtttgccgtacgttataacggatagagtatgttagtacttgaaataagcgatgcttttttaagcataatttaggtggtaccgcggaagtatctccgtcctaattaataagattagggcggagttttttatttgcaattttaacaaaataactattctagaatacaaacatactatcatgttatacatatcaaagccgatttagtctgaaacttttgaatattaaaaatataaggagagatttattatgagaatgaacctaaaaaaactaatcattaattctttatttcttgccgtaggcgtagttttaaaccaaattacaccgccaatattatttggaatgaaacctgatttttcattggcaatgttattcataataatactactaaatgatgactataaaacatgtatatctaccggtgtcgtagcaggtttacttgcagcagctgttactacctttccaggtggacaactacctaatataatagacagaattgttactacaagtttagtatttatagctttaaggccttttaaagataaaataaatgataaaatccacatgataataacaactatagttggtacaattataagtggttcagtatttttaggttcagccttaataattgtaggtttgcctgcaagctttaaagcactatttattacagttgttcttcctgcaacaattataaacgcaatagttggtacaattatatttgtggccgtaaaaaaatctatgagagtagtattcagacaatagaatatatttatagttttaaaaatagagagctgcttcactaatttagttaagcagctctctactattataatattttatttaaaaattccttagttctttcttctttgggatttgtgaatatcccttctggagtattctcttcaactatttttccaccgtccataaatattactctatcagcaacttcacgtgcgaagcccatttcgtgagttacaactaccattgtcattccctcttctgcaagctctttcattacacttaaaacttctcctacaagctccggatctaatgcagaagttggttcatcaaacagcattatgtcaggctgcatacaaagcgctcttgcaatggcaaccctctgcttttgtccgcctgacagttttgaaggatatacattcattttatcacttaacccaaccttataaagtaatgcctctgcccttttgcgtacctcactcttattttcttttttaacagtaattggagcttccataacattttgaagtacagtcatatgtggaaatagattataactttgaaaaaccattcctgttttctctattatctctctatacttcttcttatccttatggtttaaaacctctccttcaataataacctggcctccatttggctcttcaagatgatttaaacatcttaaaaacgtactttttcctgaaccagatggtcctattataacaagaacttccccctttgaaatattaacatttagatcttcaaaaacagttaactttccaaaggtttttgttaaatttttagcttcaatcattaacatacgaaaacacctcttaatatacggataattttttctctatctttgagaatatccctgtgaatatagttgtcaaaattaaatagaatattcctgcaaacaagtaaggagtaactgcatcaccagatgaggaaaccaaaagttgtgcttttcttaaaagttcctccatagttattactgaaaccaaagaagtatcttttatcattgctatgaactcattaccacaaggtggaattactactcttattgcttgtggtaatataattcttttcattgtctgtccatatgttaaacccaaagcttttgaagcttcaaattgtccattatcaatagcaagtattccaccccttattatctctgcaatatacgctccagagttcaagcttaagcctaatattgctgccttcattggagtcatagtgagtttatcactcaaaaatggtagtccataataataaacatataattgcagtaaaagaggcgttccccttaaaatccatgtgtaaaacttacctataagatttaataccttaactgatgaagttttaaacatagctataatagttcctataatacatccaataattattgaagaacaagttagtagtaaagtaatacgtgttccatctagtaaaactggaattactttatttaaagagcttatatccattaaaaaattcccccaattagtgtttctttatgagtgcccattactaaaaataaagtggaagctattaatagacatctattccaaaccatttctttgatagctttgacatagttccgtccttttttagttcttttatagctttattgtaagcatctcttaaagatttatcttcttttctaaaggcaactcctataggttcctgtgtaagagaagattccagttttttaaacttcccaggatctgtaacattataataatctccaaccatagggtcactgacaactgctgctattcttccgttttgtaaatccaaaaatgcatctgtcatagcgttatatttcttaacttcttttattcctgatattttagctaaaacatcttgagcagtagttccaacctcacagcctacaacttgattattaaagtctttttcatttttaatagtagtgttgtctgattttacaaaaattgcatttccaccatatatatatggatccgaaaatatcattgctttctttctctcgtccgttatacttatgcttgagtgcacaacatcaaatttcttagactttaatgcaagaaatataccatcaaatgaattaggaacaaatttagtttttactccaagctttttggctatagcatttgccatatctatatcaaagccagaaaccttgcctgtagccttgtccttaaattccattggcggataggtgtcatctatcccaattactatttcctttgctttcttcactctctcaagagaatcatcttttgatactgtagctgatgtacatcctgtaaaaatggcaagtgttaataccaacacaactgataatgaaaaaatcttctttaacataaaaccacctctgccttaataattgaattttattgtaaatcgttttatttgtcaatgaataattattaacagcgttgtatcattttaatattatcaagagtgcattttgactattcgaacaatacaatcgtgttttaattaacaatatgttaacacatgtgtgtactaattacaataaaattaatatttatgcatgatattttttctgcaaagtgcatgaaaaaaatatgtttggttattataaactcggaggcgattatttatgaaagcatttgtagataaagaaacttgtattggctgtggtacatgtcccgcaatctgtcctgaaatatttgaaatggaggatgatggcaaagctgttgcctcagatgcagaaattgcaaacgatctaaaagaatcagctcaagatgcagcagaatcctgtcctgtggacgccatcatggtgagataaaatatttggatttatatgtagggaaacctgttatactctcaagtttcatattggtttccctataaaaccctcttgacgcataataaatttaagtttaaaatattcatgataaataaaaagaaaacattttaattaactaactgtttaatgttttcttgtaataagacagttcgcaatccatcctgtctataaacaaaaccagggcaatatctaccgggtgaggtaggtttttttgtttatagggcggattacgccctttttttattataaattatggaggaaatcatgaaaaaaataggtctgactactacggtaccaatcgaagtgttactatcagctggttatactcccattgatttaaataacatttttgtagggtctaaagattattctaaatacattgatattgctgaaaaagacggctttccaaagagcctttgcgcatggataaagggaatatacggagcctgtattagtaatgatataaaagaaattgtaggagttcacgatggtgattgttcaaatacaaaagcattgacagaggttctttctatgaaaggaataaaggtatatccattttcatatccctcaagtcataacataaatgatgtaaaagatgagcttgatgccttcatgaatttatttcatgtaactttaaatcaagttgaaaaaataaggacaagattaaataaactaagagaactaggtatagaaatagataaactaacttttgaagataacaaggcaactgcacttgaaaaccatatatggcaaatatccttcagcgatttaaatggtgatattgatgcctttaacagcgatttaataaaaactatagctgacataaagaaaagagaggcaagctcatcaaagctccgcctaggctatataggcgtacctcctatgacgcctgacatatatgagtttgttacaaattttgatgcaaaaattgtgtacaatgaagttcaaagagaatttgcttttccaaggagctcaaaagcaaaagacatttatgaacaatacttcgactacacttatccttatgatgtttactttagaatagacgaaataagtaggcaaattgaagagcgccatatagatggaatcatccactacacacaagccttttgttatagggcagtccaagacatagtaataaaagaaaagctcagggtacctgttataaatatagaaggagatagattaaatcaccttgatgcaagaacaaaactcagacttgaagcttttttagacatgcttcttgattctaaggagggaatcttttgaaaactttaggtattgatcttggaagcagagaagtaaaactcgcacttatggaaaataataaaatatgcagtacctttaaaataagtactataagcttttataaaaattattgttcctacaaaaataataaaattgaagttgatttagaaaaactaaatttaagtgatatactaagcggagtttcaactggttatggcagaaataatacaaatttatcactattcaagccaataaacgaaattaaagctcatgtttacggcgttatgtatcaaacaaatcttaaggattttgtactcttagatatcgggggacaagatgttaaggcagcaaaggtagaaggtggcttcataaaagatttagagcttaacgagaaatgtgctgcttcttgtggacgttatctagaaaatatggcaaatgttcttgagatacctctagatgaaatgaattccttctatgaaaatccagttaaactaaactcaacctgtgctgttttctctgaatctgaactcataggaaaaatagctgaaggaacctctatagaaagactctgtgctggagtaaactactctatgtacaataaaatgaaacctttgcttacaaaattcatggcaaaaaccttggtacttacagggggagttgcaaacaactatgctattaaaaaatatctttcccacgactatgaaaatataatagttccaggaaaccctcagtttaatggtgccattgggtgctgcttctatggaagcaaattatatagtaaggagtaatttaacatgtatattttaaaaatagaacatagctttgatagcgcacacttccttaataactataatggtaaatgtgcaaacattcatggacatagatggagagtagaaattgaaatacaatctgaaactctcattgatgatatgattgaagattttacaattcttaagaagaggattaaagaagtccttgatttttatgaccatgctttaataatagaaaaaaatagtcttagaaaattaacctttgactgccttatagaagatggctttaaaataatagaattggactttagaccaactgccgaaaacttttcaaaattcttttttgatgaaataagaaaattaaattatgatgtaagaaaaataacagtatatgaaacaccaaataacagtgcttcatatgtaaaagaggtatagaaatgaactataaagtggttgaaaaatttgtgagcataaatggagaaggattaaaatcaggacaactttctgtattcataaggttcgcaggttgtaatctaaattgcaattattgtgatacaaaatgggctaatgaaaaggatgtaaagtataccttgatgacagaaaaggagatactttcatatataaaagaaacaggagtaaaaaacgtaaccttaacaggtggcgaacctcttcttcaagatggtatagtcgaacttttaaaccttctatctttggatagcactttaagagtagagatagaaacaaacggaagtgtatccttagaaaactttttaaacttcaaaaatgccccttcttttactatggactataagcttcctgatagcagtatggaaaatttcatgaaaacctcaaattttaagttcctaaataaaaaagatgtgataaaatttgtagtaagttctttaaaagatctcaaaaaagcaatggatataataacagaatttaatctttcaaaaaaaacaaatatttatatcagtccagtgttcggaaggatttctcctgagaccattgttgatttcatgaaggataacaaacttaatgatgtaacactgcaaatacaaatccataaaatcatatggaatccaaataaaagaggtgtataatctatgtctattgatacaaaagcaattgaaaaacacataagaggaattcttatagcgttaggagatgatcctgatcgtgaaggtcttaaggaaacaccaaaaagagtagccaaaatgtatgaagaagtatttaagggaatggaatactcaaacgacgatatagcagaaatgtttaataagacctttgaagaagatttaaaagaaagtgaagaggataacatagtccttgttaaagatatcgaaatatttagccactgtgagcatcacctgacgcttatgtataacatgactgttgcagtagcctatataccaaacaagcgtctaattggcctcagtaaaatagctagaatcgctgatatggtttcaagaagacttcagcttcaagagagaataggtaaagacattgctgaaataatggaaaaggtaactgcttcaaaagacattgctgtaattataaaaggcgagcacggctgtatgacctcaagaggtataaaaaagcctggagcattaactacaacaatgacacttaaaggaagatttaaaaatgatgattctttagtaacaaaacttatggctttatacaaggcataagctgtaatatgaaaggagatttatatggaaataagtataaataaagagaaagctctcgtagtattcagtggaggacaagacagcacaacctgtttattttgggcaaagaaaagatataaagaggttgtagctgtatccttcgattacaatcaaaaacataagcttgaacttgaatgtgcaaaagatatatgtaaaaaacacggagttgaacatcatattttggacatgaagcttctaaatcaactagctcctaattccttaactagagctgatatgaaagtagatgaagatgcacctaaagacggtcctcctaacacttttgtagacggaagaaatctgctctttttaagctttgcagctgtatttgcaaaacagagaggaataaataacataataactggggtatctcaaagtgacttcagcggttatcctgattgtagagatgtgtttataaaatctctaaacgtaactttaaacttagctatggattatcaatttgtactaataacaccccttatgtggatagacaaagctgaaacctggaaacttgccgatgatttaggcgttttagatatagtaaaaaatgaaactttaacttgttataatggaattaagggcaacggctgtggagagtgtccagcttgtaagctcagaaaaaacggatatgtagaattcaaaagactatataagtaaaaaaagccctgcaaaatttgcaggacttttttaatataaatgacagctcacaaagtgtcctttttcaatttccttaaactctggtttcttttcaaaacaatcgggttttgcctgtttgcatcttcctgcaaatctacatcctggtttaggattaattggacttggcacttctccctcaagctttattctctgtctagttttttcaaccttaggatctggtattggtattgctgacattaaggctttagtatatggatgtagtggattctcatataggtcatgactagcagcaaactccaccattgttcctaaatacattactcctactctatcagaaatatgctttaccatagaaaggtcatgggcaataaataaataagttaaacccatctctctctgaagcttaataagaagatttactatttgagcttgtattgaaacatccagcgctgatattggctcatcacagacgataaactctggatttatagcaagcgccctggctataccaattctttgtctttgaccacctgaaaactcatgtggaaatctagatgcatgttctctattaagtccaacatgatctaacatttcatatatttttttagttctttcttcacccttatataaaccgtgaacatcgattccttctgcaattatatctcctacagtcattcttggatttaggcatgcatacggatcttgaaatatcatttgagcctttttgctaaattccttttttgccttacctcttaaactatgtatgtttactccgtcatagtttacttctccctctgttgcctgatataatcctaaaacagttcttccacatgtagttttaccacagcctgattctccaacaagtcctagagtctcaccctttttaattgtgaagcttacatcatccactgcttttaatattgcattatgacctacattaaagtacttttttaagtttttaacttcaattaaaacatcgcttttattaccttcagccattatagcgcacctcctcttgtaataggtgattctacttttggtgctctagaatccttaagccagcagctaactgaatgtgtttctgataatttagtctcttctggcatttgttccttacaaattcccatgcaatacttacatcttgcagcaaacggacaccctgctggtggtttaagcaaatctggaggagtaccgtttaatgaatacagctcacctttgtttgcagtatctagtcttggcacggattgaagaagtgcccaagtataaggatgctgtggattttcaaaaatatcatcagtagttcctctctcaacaataataccagaatacattacttgaattctatgtgctacacttgcaaccactcctaaatcatgagttataagaattatagctgttcctagtttttcttgaagttcgtgcataagatccattatttgggcttgaatagtaacatccaaagctgttgttggctcatctgcaattaatattttaggcgtacaagctagtgctattgcaatcatcgctctttgtctcattccaccagaaaattgatgaggatactggtttgctctcttatccgcatttggtatattaacagcctcaagcatctttatagcttccttaaaagcttctttttccttaagtcctttatgaatcataatactttcagcaatttgctttccaaccttcattgttggattaagcgaagtcataggatcttggaaaatcatacttatatctccgcctctaagcttgcttaattccttatcatccatctttaaaatatctttatcaccaaaaagaatctctgaaccctcttttatttctcctggaggacaatctataagcctcattattgatttagatgtaacagactttccacagcctgattccccaactattgctaaggtttcacttttatttaaatgaaagcttacacctctcacagattgaacctctccagcataagtatggtaagaaacctttaaatttttaacctctaatactttttccataatagttacctcctactgtctctgcttaggatcaagcgcttcggataaaccatcacctaaaagattaaacgtaagcattataagacatataataagtgaaggccaaaaaagttgtgctggatagaacatcaaatttgtttgaccactagagcacaatgctccaaggcttgtacttggcggcttaacacctaaaccaatataacttaaaaatgcctctgcaaaaatatagtttggaacggcaaacgtaacgtcaactatcattaccccaataacattaggcagtaaatgtttcattattattcttaaagagcctgcacctaatgtgtgagcagcaagtacatattcctgttcctttatagctaagacctgtcctcttacaattctagccatgcctacccaaccagtaagtgtcattgcaataattaacggtactatacctgtgctatttaaaactattataactatcaatactaaaattaagtacggtatactgtttaatacctcgataattctcatcattatatcatcaacaattccaccgaaatatcctgaaattccaccataaattgcacctataacaagctctattgcagctccaaccacacctattattatagatgacctagttccaatccaaagcctaacccacaaatctcttccaagatcatcagttccaagccagtgagtagaatctgctcccatattcttaatagagttatttacatcattagttccgaatggccttagcattggcccaactatagctaaaattattattaatatcaatatacctaaagaagcaatagcaactttatttttctttaatcttctccatgcatcttgccaataggttacgtttttcctgactatctcttcggaattattattttcgcatccaataatttcaaactttttacttgaagtttcagccattttttcccctcctattttttgttactacttagtcttattctcggatctacaagactatataatatgtccactaaataaacggatattatgtatacgacggcaacaaaaatagttgtcccaagtataataggataatctctatttgttattgaagttacaaaatacctacctattcctggtatggagaatactgattcaataacaaaagttccagttaaaacagctgcaatttgttgtcctaatatagtaatagcaggtaaaatggcatttcttgtaacatgcttccatataagtggtaccttggaaacacccttagcttttgctgtcattatataatcctgtcctaaaacatctatacaactacttctcatgtaccttgcataaaccgctattattcctaagcttaatgaaagtgctggtaatattgtatatttaaagccaccccatcctgaggtaggtaatatttctatttttactgttaaaaaatattgtaataaagctgctaaaacaaatgacggtatagctatacctaaaattgctattatcatcacaagataatcctgccaatgatttcttttaaatgctgctataattccaaatgtcataccaataactagagcaaaaatcaatgcttctgctccaagcgctgcagaaaccggtgccctctctactattatgctattaacagttaggcctggataagtatatgattctcccaaacttccatgaaaaacaaggttcttaagaaatattgcatattgagcaggcaatggcttatctaaaccatatctcttatttaaattaatttttgtctgtggagataatgatcttccggtagaaaacggattacctggtatagagtgcatcataacaaaggttatggtgataactatccaaatggttattatcatgtacacaaatcttttaagcgtatatttcagcatctttaatcctcctaaattaaaatataaatatatgtttatacggcagagacaataaaatatctctgccgtaatctcattatatttgtttgctagttaagccttagaatacagtgagattatttattttttcctgaaatataagcgtatttaaattctacatctcttgatccgcttgctccaaattgtggtgtttgaatgcctttaacatatttatatgcaaatagattttctccttggctgaaggttggagcaattgctgcgtccttattaacaagtaaatcctctgcttttttaaagtcatctaatctcttagcttgatccttttgaatttttgcatcttctattaatgcatcatattctttgtttgcatatccattcttagtctttgctgcatcagtttcccacatatccataaatgtcataggatcattataatctgctgaccacatttcaccactttgcatttcatagtttaagtcctcttcatcttgcaagaactgtttccattctttataatcaacttttaaagttactccaaggtttttcttaaatgcatttattaagtaatcgccctctaatttatgtctttcatctgttccagcctcttcatcatttaaaacaaccttgcttaaatctgtatccattccgagctcttttaatccctgtttaaataattctttaggatcttctttactgtcctttacggatacatttgctttagatctgtatgattcgtctcctatatcaatagcttttggaacccatgcatttgatacagttccaatattatagcttgtagttttaagataatcttttctatttaatgaaagtgaaatagcttttcttattttagcatttgttagtaacttgtttttgtcttgattattaaattccaaatatgagttagttggaacatttccagttacttgattgaactttccagtcttgttaaatctactaacccattcaggtctaagtgtatctgcaatatcaatttgaccactttgaagtgcatttaacattgtatttgcatcatccataaaatacattgttactttatcaagttttacacttttcttatcccaatattgatcattcttcacaagttctattttatttccgcttaccattgaagtcattttaaaaggtccgttatagactaaagtatttgcagccgagccatattttgatcctgcctttttaaccatatcctctctttgtggtataaagaatttgaagttaagtaatttctcaaaatatgcgcatgggtgtgataaatttattacaagagtttttgaatctggagcacttactcccaattgatcagatgacatcttccccttatttatctcatctgaatttttaattcctgcccctattaatagatatgcatactctgaagctgtgtttgcatctaaacttcttctaagagcatacacatattgatctgctgtaacaggttttccatctgaccacttattatctctcaaatggaatgtccaagtaagaccatctgaggattggctccagctcttagcaccagctggtaccactacctctttaccatttttcacttcatctctagagagtgcctccatggtctcctgtagaacgtatgcagagtaaccatcagatccctttgatggatcaagagttttaacatcagatgtagggacctcaacatttaaatgctgatccttatcaagtgcaccagaagcccctgctgaggttgaagaactaccacaaccagataaagcaactgttgaaataaccgctgccgatagtattactgacaataattttttacttttcattgaaatttcccccttaataaatttatactgtaaacgctattttttagtctagctgtattacccattttttatattgcagaaaaaaacacccttattttacattgtattaaattacttatattgaaatctatagcagtaacaactattaacatgttatgtttaacattttcttaatattaataaaattacttatatattttgtataaactacagtatatgtttttgattccattaattatattttattgtatgcattataaaagctcttttcaagtattaatccaacacgtttttgatgttttttttgtgtttttattaaaaaactgcctatttcctttaaaataatgcgtaataaacacttatttaaaaaaaatggtatattaaattcaaatatgcaccgattataatatatgtaataatataacacggtaaattaaaagtactacaaaactactgtaaatagttgtgtagtacttatcttttatttattttttaatataagtattattgaagtatacaaatccaagtggtgatttgtgaagatctttaacgtacggttttacttcaactacatttgtgtattcatatataggaattacaggtaaatctctcattgcagcatcctcggccttatgcatatcatcgattctcttatctgcatcattagttgttttagcatctttaattaatgcatcatattctggattactgtaacctgaattattgtttcccgaatcagttacaaataaatccataaaagtcataggatcattatagtctgctatccatgaagctctgcaaatttgatattgctgcttagttaaattatctagttgaacttttctttcaacgctttgaagtgtaaagtttatatttaagttcttcttatacatatcttgtagtgcttgaactacatcttgattatttgaaccttcattatacattatctgcattgaaggaaagcccttaccgtctggatatccggcttcagctaacaattgtttagcctttttaacatcaccttttgcaggataataatctttattcttaaatgtctttccgttaggaagctttattgagctaggtacaaatgaagttgcaggtttttctccaccctttgtaacattctttacaattgattctctatctacagcaaggtttaatgcttctcttacttttgggtttttaagagtttttgttatttcagctccattagcactgtctttatcacctacatttatatcaaagaagtaagttccatagtaaggatatgcctttgcatcacctttttgaattagcgatgatttttgaacagctggtattaaatcattgatatcaacctgtccgcttgtaaatgctgctgtagcgctagattcttgcgccaacatatagtaagttattgaatttaactttatagtattcttattccaatagtttggatttttactaaaggtcattgttgctttcattttccaatctgtcatatagaaaggtccgttacttacatagttttgtttcttagctgcccaacccttgttatccttactaactatatcttctcttaatggcatatatgttggaaatgcagttagacttaaaaagtatggagtaggtgcttctaaattaaccttaagagtgtaatcatctatagctttaactcccacatcatctttactagcttttccgttattgtaagcttcaccatttttaagatagtaaagttgatatgcatagtctgaagctgtttctggtgctaatgctcttttccatgcaaattcaaaatcttttgcctttactggttttccgtctgaccacttagcattttttcttaaatgaaatgtataagtaagattatctgctgaaatatcccatgatgatgctactccaggaacaactttttcatttttatttatgtccactaatccttcaaaagcattctcaataactgtaccaccttcaactgaattatttaatcctggatctattgtttgtggatctgcacctaaattatagcttaccttctgctctgtgcccgatgtactacttgaagaactactaccacagccagccaaaagactgctcgctagtgctgctgataccaaaacagcgcttagttttgttaactttctcttcaacatattgttattcctccccgaatattttttatataatttagcagtttaacctaccaaataccaaattaatgatgctttatttatatagataacaagctactgaatgattctcccctatatccttaaattctggtgcagcatccttacactcaggcttagcatatctgcatctacctctaaacttacatccccttggaggatctataggtgatggaatctctccttcaagtattattctttgtcttgctgccgcttcgtccggatctggtactggtaccgcagacaacagtgcttttgtatatgggtgaagcggattattgtaaagctctgaactttcccctacttctatgaggtttcctaaatacattactcctatcttagtggaaatatgcttaaccattgataaatcatgtgctataaagaggtatgtaagtccaagttcctcctgaagctcttcaagcatatttacaacttgtgcctgtattgaaacatcaagggcagatataggctcatcacatactataaactcaggctctacagccaaagctctagctatacctattctttgtctttgaccaccagaaaactcgtgcggatatctgtttatatgatctccatttagaccaacttttttaagaaggtattctattctttcttttctctccttaccggtccacaacttatgaatatcaattgattctccaattatatcccctactgtcattcttgaatttaatgatgcataaggatcttgaaaaatcatttgcatttttcttctatatggaagcatttctttataactcaactttgcaatatcttttccgttatatattatttgtccagaagttggctcataaagctttaatattgttcttcctgttgtagttttcccacaacctgattctccaacaagccccaaggtttctcccttttttatctgaaaagacacaccatctactgcctttacattactgacgtttttaccaaagaaacctttcttcacaggaaaccatttctttaaattctttacttcaagtaatactttatcttgtggcattgtcttctctcctttcattaattggattaacctttggtgcatccggatgattaagccagcatgcagcttcatggttttcgcctattttaaaagatggaacaggcatttccatacatatttccattgtataaggacatcttgctgcaaaaggacatccctttggtggatttaagaggtctggtggatatccatctattggaacaagcttttctttactatcctttgtaggatctggtatactctttaaaagccctaaggtatatggatgcttaggattataaaaaatttctcttgcatcacctttttccacaattagaccgccatacataacgtttattttactgcataaattggcaacaacacctagatcatgagttattaatattattgatgtattcatcttttcttttaattttttcataagttcaagtatttgagcctgtattgttacatcaagtgctgtagtaggttcgtcagcaattagaagctcaggtttacatgcaattgccatagcaatcataaccctttgtctcatacctcctgaaaattcatggggatattgcttcatcctcttttccgggcttggtataccaactaatttaagcatttctatagcacgtttaatcgcttcacttgtgttcatattaagatgcttttttataccttctgctatttgatttcctattgtaagaacaggattcagagaagtcatagggtcttgaaatatcattcctattttatttcctcttattttttccatttctttttcaggtgcatgagtaatattcataccattgaatataatttcaccttcaactatctttccattttcttgaagaagccccataactgacatcatcgttacactttttccactgcccgattctccaacaatgccgagagcttctcctttatttaattcaaaggaaattcctcttactgattttacttcaccaagatgagtaaaaaatgaggtgtttagattctttatttcaagtaatttttccatagttatatcctcctattttctcattttaggatcaagagcagtacttaaaccgtcacctaagaaattaaaaccgaacatagttatacatagtgctaaagcaggaaataaaagttgatatggaaataactgatatgagccaagtgcattcgagcataaagttccccatgaagcctgtggtgctggaactccaagtccaacgaagcttaaaaatgcttctgtgaatattgcattaggtatatttaaggtcaaattaactattataggtcccatagtgtttggtaacagatgttttataagtattcttttagacgaagcacctagtgttttagctgcaagtacaaactcctcttgttttaactgaagaatttgccctctaactatacgtgccatatcaacccaataggttaatgctatagcaattataagactggtcattccttgacctacaatgaccattattaatattacataaatcattaaaggaagtgaggaaacgccttcaactattctcatcattatattatcaacagttcctccaaaatatcccgatattccaccgtatataattcctattacaaagcttattacactagcaacaagtgctatagtaagagatattcttccaccatacataacccttgtaagaatatctcttcctaagttatcagttccaaatagatgtattgaattaggtgataaatttgctgatgcgtaatcattagtgtagtagttaaactttgaaaagagtggtccaacaacagaaaataaagtgacagcaattataataacaaggccaacaatagctaatttattggacttaaatcttctccaaacatcctgccaataagtaaaactaggtcttgccttctcatgtgttttctttctatcttcacttacggtcttaaataaatccttacttatactttccatatctcataccctccaaactaattttgtaactttattctaggatcaattattacgtacaatatatccactattaaattacacagtatgagaatagcactaaagaaaacagtaacgcctattatggttgtatagtctctattgtcaatgctgagtacgaactctcttccaagccctggtattccaaatatggattcaacaacgaaacttccagttaaaacccctgctataagtggccctaaatacgttactactggaattaaggaatttttaagtgcatgcttataggttattatgttcttggacaatccttttgcttttgctgttcttatataatcttgacctaaaacatcaataagcattgaacgcgtataccttgttacaaatgccatagggaatataccaagtgcaagtgcgggcataatataattagatggagtagaaaagcctaccgctggtaatattttaaactttaatgaaaacaagtagataagaagtgttgcaagaacaaaactaggaatagttactccaaaggttgaaattaaagtgcttagtccatcttgccatttattttggtgaatagcactcatagcgcctaaatatacaccgactacaactgcaaataaaatagccactgcgccaagctttgctgaattaggaaatgaataagttattatatccttaaccattcttccttcatattgcattgacatacctaaatcgcccttaagcatgttagtaagatatgttgtgtactgactaccaagtggtttatccaatccaaacttagctttcaagttagcctcaatggctggtggtaatttcttttcgcttgtaaatggccctcctggtattgcatgagctaacaaaaaagtaaatgttacaactatccaaagagttacaatacttgcaataaacctctttataatatacctaaacattttgtttctcccctcatgattaataattattaactctaagctatgctcttatctatactgtcaggatctatacctaattcttttataattgctgatatgtattttttacctgttctttcaccatgaaaaaccaaatctaagtatttagtgctagatcctactctcctagctaactctgtttgagacatttccttttcaagcatcgccttcttgcatgctataccaaatgatgtaagacgtcgttttttatccataagctacctccccaggttaatataaaaattattattacgtatacattgtaaacattattccttaataatactcttttacaataatatattattgatgtatggttctatcaattatacttttattgtattagctataaattcattttgcaaataacaatatagcataatttttgcctttttattgagtttttgtcaaataatcaccgcttttctttaaaatcatgcatcattaaaacatttatgtaattgctatgttttttatacttttaatgtaatattgtttgcataaaaaataccgcaggctaaattaaatagcctacggtattcttaactatatattatttttggatataagtattattgaagtatacaaatccaagtggtgacttgtgaagatccttaacataagattttacttcaactacatttgtgtattcatagataggaattataggtaaatccttcataagaatatcttctgctttatgcatatcgctgattctcttgcttgcatcagtagttgatttagcgtctttaattaatgcatcatattctggattgctgtagccaggattgttgtttcctccacctgttacgtacatatccatgaatgtcataggatcgttgtaatctgctatccatgaagctctgcatatctggtattgctgtttagttaagttatcaagttgaacttttctttcaacactttgaagtgtaacatttatattcaagtttttcttaaacatatcttgaagcgcttgaactatatcttggtggtttgatccttcattgtacattatctgaagagtagggaagcccttaccatctggatatccagcttcagctaataattgtttagcttttttagcgtcaccttttgcaggatagtagtctttattcttgtatgcctttccgtccgcaagttttattgaactaggtacgaaggaagttgctggtttttctccaccctttgtaacattctttacaattgattctctatctatagcaagacttaaagcttctcttactttttgatccttaagaacctttgttatatcagcaccatttgaaggatccttatctcctacatttacgtcgaagaagtaagttccatagtaaggatatgcctttgcatcaccttttttgattaatgctgatttttgaacagatggtattaagtcattgatatcaacctgaccacttgtaaatgctgctgtagcacttgattcttgtgataacatgtaataagttattgaatttaattttacagtgttcttattccaataatttggatttttcttgaatgtcattgttgcttttaacttccaatctgtcatgtagaaaggtccgttacttacataattttctttctttgtagcccaacccttgttatccttgctaactatatcctgtcttaatggcatgtatgttgggaaagctgttaaacttaagaaatatggagcaggagcttctaaattaactttaagagtgtagtcatctacagctttaactcctacatcatccttactagcttttccattgttgtaagcttcaccatttttaagatagtaaagttgatatgcatagtctgaagctgtttctggtgctaatgctcttttccatgcaaattcaaaatcttgtgcctttacagtttttccgtctgaccacttagcattttttcttaagtggaatgtgtacgtaagtttatctgctgaaatatcccatgatgacgctactccaggtacaactttttcatttttgtctatatctactagaccttcaaaagcgttctcaataactgtaccgccttcaatagaattatttaggcctggatctattgtttgtggatctgcacctaaattgtagctaaccttttgctctgttcctgacgtgctgcttgaactactaccacagccagctaggagacttccaactaagagagctgatattaaagctgcgcttagttttgttaatcttctttttaacatattgttattcctccccgaatgttttttatataatttagcagtttaacctaccaaataacaaaatttatagagccttattgatacaaataacaagctacagaatgattattgcccatatctttaaacgctggtgtagcttctccgcattcaggcttagcatacttacatctacctctaaacttacatccctttggaggatctataggtgacggaatctctccttcaagtattattctttgccttgctgctgcttcatctggatctggtactggtaccgcagacaaaagtgcttttgtgtacggatgaagtggattattgtaaagctctgaactctctccaacttcaataagattccctaaatacataactcctatcttggttgaaatatgcttaaccattgataaatcatgcgctatgaatagataagttaaaccaagctcttcttgaagttcctcaagcatatttacaacttgtgcctgtattgaaacatcaagcgcagatataggctcatcacatactataaactcaggttctacagctaaagctctagctatacctattctttgcctttgaccaccagaaaattcatgaggatatctatttatgtgatctccatttaagccaacctttttaagaagatactctatcctctcttttctttcatttccctttgataaattatgaatatcaattgattctccaattatatcccctactgtcattcttgaatttagcgatgcatacgggtcttgaaaaatcatttgcatttttcttctatatggaagcatttctttatagctcaactttgcaatatcttttccatcatatattatttgtccagaagttggctcataaagctttaacactgttcttcctgttgtagttttaccacaaccagattctccaactaagcctaaagtttcacctttatttatagtaaaagatacatcatccactgcttttacattactcacctttcctccaaagaagcctttctttacaggaaaccatttctttaaattttttacttcaagtaatactttatcttgtggcatcgtctttactccttccttcttcttccttaacctttggtgcatctggatgattgagccagcatgctgcttcgtgatcttcacctattttaaaggcaggagcagatttttccatgcatatttccattgtataaggacatcttgcggcaaaagggcatccctttggtggatttaaaagatctggtggatatccgtctattggaacaagcttttctttactatcctttgtaggatctggaatactcttcaaaagtccccaggtatatggatgtttaggattataaaaaatctctcttgcattacctttttctatgattgttccaccatacataacatttatcttagtacacagattagcaacaacgcccaaatcatgagttataagtattattgatgtattcattttatcttttaagtttttcataagctcaagtatctgcgcctgtattgttacgtcaagtgctgttgtaggttcgtcagcaattaataattctggtctacacgcaattgccatagcaatcataaccctttgtctcataccacctgaaaattcatggggatattgcttcatccttttttctggacttggtataccaactaatttaagcatttctacagcatgcttatttgcctctgctgaactcattttaagatgcttttttattccttctgttaactgctcacctacagttagaactggattcaaagaagtcataggatcttggaatatcattcccattttatttcctcttatcttctccatttctttctctgaagcttttacaaggtctactccgttgaatataatttcaccatctattatttttccattttcctgaagaagccccataactgacatcatcgttacactttttccactacccgattctccaacaatgccgagagcttcccctttatttaattcaaaggaaattcctcttacagactttacttcaccaagatgagtaaaaaatgaggtatttaaattctttatttcaagtaatttttccatcgttatcctcctactttctcattttaggatcaagagctgtacttaagccatcacctaagaagttaaaaccgaacatagttatacatagtgctaaagcaggaaataaaagttggtatgggaataattgatatgacccaagtgcattcgaacataatgttccccatgaagcttttggtgctggaactccaagtccaacgaagcttaaaaatgcttctgtgaatattgcactaggtatgttcaatgttaaattaactataattggtcccatagtatttggtattaagtgctttactaatattcttgtagatgaagcacctaatgttttagctgcaagtacaaattcctcttgttttaactgcaagatttgtcctctaactatacgtgccatatcaacccagtaggttaacgctattgcgattataagacttgtcattccttgacctacaattaccattattaatattacatagatcattaaaggaagtgaggaaacaccttcaactattctcatcattatgttatcaacagctccaccaaaatatcctgatattccaccatatataattcctattacaaagcttattacactagcaacaagtgctatagtaagtgatattcttccaccatacataattcttgtaagaatatctcttcctaaattgtcagttccaaaaggatgtgttaaattaggtgataaatttgctgatgcatagtcattagtatagtaattgaattttgataaaagtggtcccacaacagaaaataaagtgacagctactataattgccaaaccaatcatagctaatttatttgatctaaatcttctccaaacgtcctgccaataagtaaaacttggtcttgccttctcatgtgtcttttttctatcttcacttactggtttaaacaaatctttatttatattatttgtattttccatattcacacccctaaaagcctaattttctaattttattctaggatcaactattacatatagtatatcaaccaccaagttacataatattaggattgcactaaagaatacagtaacacctattatggttgtatagtctctattatcaatactcagtacgaattctcttccaagtcctggtataccaaatatggattcaacaacaaaacttccagttaagacacctgctataagtggtcctaaatatgttattactggtattaaagaatttttaagtgcatgtttataagttattactctctttgatagtccttttgcctttgcggtcctcatgtaatcttgacctaaaacatcaatgagcattgaacgcgtatatcttgttacaaatgccatagggaatataccgagcgcaagtgcaggcataatgtaatttgatggagtagagaaacctactgctggtagtatttgaagctttaatgagaataaataaataagtaacgttgcaagaacaaagctaggaatagttactccaaaagttgaaattaaagtacttaacccatcctgccatttattttgatgaagtgcacccatagttcctaaatataatcccactataactgcaaataaaattgctactcctccaagctttgctgaattagggaatgaataagttattatatctctaaccattcttccttcgtattgcattgacattcctaaatcgcctttagccatattcttaagatatgttacatattgctgactaagtggcttgtctaaaccaaacttagcttttaaattggcctcaatagctggtggtaatttcttttcgcttgtaaaaggtcctcctggtattgcatgtgctaacaaaaaagtaaatgttacaactagccataaagttacaatacttgcaataaatctttttataatatacttaaacatcttgtttctcctctcacttgatacgcttttgtatgcttttgtatcttattaaattttattggaacatgtatattaatatctaaggttaaaatacagctcttcaacaattaaatttataagctataattttcttttatattttcagaatctatccccaattctctaatgattcttaatatgtacttctttccagttctatctccatggaatatcaaatctaaatatttactgcttgttcccaccctcttcgctaactctgcctgagaaatacttttctcaaccatcatctttttacaggttatgccaagtggagtaagacatcgtttttctctcatatgagcccccccatttttaatatttaaaagaaaaaatgcataaatattttttaattctatcgaaattgccaaaaaactttgttaaaataaagtgtatatgagttgattattaaaatgatatgagaaataaaatttcactattgatatataaaagggtgtttttttattaaagtattaatttgatgtatatttctatcaaactactatttattttatgctctataaatactttttacaaatatagatatagcatgttttttgcgttttttttgtgtttttattaaaaaaatgcttattctctttaaaatcctgcgtaataaacgcttttttcattggaggtttttattatgaatactattggggaaaggctaaagtatttgagaaaacttaataatcttactcaaaaacaggttgccgaaaagacaggtgttcaaagaggtaatataagtcattatgaaaaaaatgattttttgccatcaagagtagcattaatttcttttgctaacttttttaaaacaaactatgattggatagtttatggtaagggagctattcctaaatctatagatgaagtaatgtacgcaaagtctaacagtattgctgagtgcaataatggtgctgctgttgatttctcaaaacgactaatatttactatgaagtactttcatgaaactatagatgggctgtgcttaaagttaaatatctcaaaagatatctttcatgaaatattaataaaaaaaaatgtttcagcttttgatttatttaaaatttgtaactattttaatgtaagtatggattggatgtttaatggtaatattacatatcttaaatcggatgccaaactacagcaggcctatttaatgaactctaagggaaataaacctttaagctacgataatcatggaatggtacaatgtacttgtgaagaaaagaagttacttatattctttgaaaatttaaacacaaaagataaaagcttggtaattgatattctaaactccgtaaataatcaagcatcaatggacatacaaaaacttattaaataagtaaaaacaccagtaaccctggtgtttttcttattgtaaatattaactatttgccttctttcaattgattcaaacaactttggcaaatattttttcctttatagttaattacatctcttgcatctccacagaaaatacatgctggttgatacttcttaagtataatctgctcgccatcaacatatatctctaaggcatccttctctgctatttctaatgttcttcttaactctataggaataactattcttcctaattcatctactcttctaactacacctgttgatttcattaataaatacctcctaaagtaacaacattcgactttgtcttgtttaaattatagcattatttacattataagtcaacttaaatattaatataatttaatttttttcattatttttcttaaaaaccatttttgaggactatattttgaaatttattgtagctttttatcgaataatgtatcgcgtattttcctttattatgattaataactataaaatgtattatttattttttcctcataatagtctatttctctttcaatttgaaatccaatgcttttatacaattcaaatgcccttttattattgctatctacctcaagggctatgtcatcataatccctttcaattaagtattctaaaagcatactcatcatttctcgtccaaatcctctgcctctatactctggtaatattccaactccaaaaatagataccttatcatgataaaagtatgcggctacaactcctatataatcctcttttaatttcaacttaaactgtagtctatcgctggattcaagcgcattcttcatcatagaatttgcctgctcatagctctcactatatacatcagatgctacttttgttatcttatttaaatcattgtaattcgcttcagctaattttgtaatatatttacccttagccttaaatttatttttattaaaattcatagtgtattcagcaaatttatatattgcatcactatttttaattacagcctctccttgcttagaccctttgggacatacaaacaatatctttggcacattatactttaagagctcattcttagccttactaagcaattctttaaaataaccttttcttctatattcaggaagcgtgcacgctgaaatttccccttcttcttctttaggggcaaatatacttacaacacttacaactttatccttttcataaagcacaaatagccatttcatactcttgttaaagttaaaaccatcatctaagttaacctcttcctgaatcccatcaaatttaccgcaagtttctgttaacttttctatctctcttactaattccgtatttaaactattaaactctttaattaccaatctcatatcacctcttattttctacattacaaaaaataaatagccatagaattaacaactccacggctactttatgtcaaaaccatttaccaaaaaaataaaaccataggttgccccccatggctttaactacaatagtctgcctaaaatcttattttaccgctaaggtcgcaaatttactttctaatttaattctatttttaaaatgaaaacttttcatattaacgacctcccctttacaaatatactttaattatacatatgagatctctattttacaaggaaattttgttaacttattgtaaaaatataagcttttacacttatgaaaatgttttccaacgggaaatatacacatttttatttttgccatattattcttatatatgcatatactgtttttattaaattccttacttattttaacattcaattgaacttaatttaaaaaaatttataaattttattaatttttctacgttttttcataatagttcccatataatgaaaatttgtaccttgatattttgaattttttttataaaattgtaatatagtataaattaattaggagtgaataaaatgaattcaattggaattgttagaaaagtagatgaacttggaagaatagttataccaaaagaaactagatctcagctcaatgtaaacgaaggagactcccttgaaatctttatagatgaagttgaaagccatatagttctaagaaaatacgcacctggttgcactttctgtaactctttaagtgatataacatactttaagggtgtgcgcgtatgcaaacattgtaaggaagagcttcaagacacagttaaataaatttgtttatatagttaaaaatacgatgaacaaaaatagtaaaatatttatgttcatcgtatttttaatttatctgccattacatatcgattacttcgcttatagagtatccattatcctttgaaaaatcaatataagtagagttcatcttcaatataggctttaataaattattaggcggtatgtacactattttgccttttctgccgtcattaagtaaaacctccgcacctatgaaatacacatttatattattcaaaaatactctaagtatatcagtatcaaatatagatataccctctgttttaaacatttcaaatgctctgaaaggtgactttttcttcttatatactctatcagaagtcatcgcatcatatacatctgctatagctataattctagaataaaggcccatttcatctgctttaattccatacgggtagcctgtcccgtttatcctttcatggtgttgtaatataacattctttatatcatcattaatagtaggatcatccttgataatttcatacccatagagaggatgttttttcatttcctcgaactcttcatctgttaatcttccaggtttatttaatatgctattttttatttttgttttaccaagatcatgaagcaatccagccgatataacttcacgaatctgcttctcagaaagattcatccatttagctataagcataccataaaaggatacattcacactatgatagaatgtatattcatctttgtctctaatattaccagcgtactttattagaaaatctgctctatcaatatcatcatatattttttgagatatatttaacagctcttcatcattgatctttttaccattacaagcaccaataataaagccttttaactttaatacagtttcttcatagctttccttaaattcttcataatattgttccttagaaactgtttctctttttgcatccttttcatattcatctcttttatatacattaatttggtttatgctattgcttaaaagcttcgtttttatataactgttaatcggtgtgtatttactaataaatttcacattgttatatgaaaatatgtcctctgcaagcacataatcactagtacaatcaatagtatttactctgcacttattcaattctctcaccctatcctaaaatattggaaaatgattttgctgtctgcattctcaccgtattttaagctaaaaatcctttaaaagcattttctaaactattatactatattgttacattatgtacaataaaataacatttaatgatattttgtattaaaaactaaatgtttttataatagatttataaaaactgtattaaatttttatataacatgttaaacaaataatatttttcacttaaaacaagtaatttcctaatactctatgcatacaacatttaatttaattaccacataaagactatgactctaatttcgactctttatcggaaatattaagtattatacataaatatctcatattttttagtaatatttttaatatggctttactatacattattgctaattgctcctgcgatatatatcaacatgcttttaaaatgtaaaaaaaatggacctttattaaattttatatttgtgcaacaatattaagtataaaactgtaaacacggggtgctaacatgatttttaatttaaaatttacgtctaaaactcataaaaaaattcagatagaaaattatatcaaaaatttaattgagacaggaatacttcagaaaaacgaaaaacttccttcaactcgcgaaatgagtttactgcttgacgttagtagaaacaccataatagatgtatatgaaacattaacaaatgagggttataccgacacaataaaaggaaaaggtacctttatttcagataaaaaaattatttctaaggaaagtcatcacttaccttggattgaatttataaacacacatgccctagacgctgcttcattagatactactaaacatgaactaagaggtactgatgatataattccatttgatagcatatctccaaacaaaaacttatttgatattgatgagatcaaaagagactttttaaatataatatctattgaagggaacaacatattgaattacggatatgctaaaggttacaaaccattaattgattatttgaaaatttatatgaaacataaaggtgttaatatagataataaagatatacttataacgaatggttttacagaaggctttaatattgtactatcaaccattactgaaaaaggagatactatattttgtgaaaatccaactcataatacttctctaaaaataatgaaacttcataacttaaatataaaaggaattgatatggatgatgatggaataaatatagattctttaaaagacgaactagaaaaagaacttccaaaagcggtttttttgattccaacatatcataatcctacaagtattgttatgtctccagaaaaaagactaaaagcaatagacatactgaattcctttaatgtacctataattgaagatggcttcaatgaggagcttcggtactcaaactcaaatataacatctttagcagccttaaactcaagcaataataatgtaatatacataggcagcttatctaaaattctatttccaggcatgagaataggttggattatggctgacaaggaattgatagattatttagaaagcgttaaacgcagcataaacatacacacttcctttttagaccaggctatactctatgagtacctacgaggtgaaaattttagcaaatatgtacgtaaagctaaaaaatattacaaaaacaaatacgagttaacaatgaaatatgcaaagaaatatataccttatgcaaaaatatggggtgaaggaggcctccacatttttgtacaggtagaaggaattcactcaagagaactgcttgccaactgttataaaaaaggtgtagcctttactcctggtgatattttctacactgacgataaagggtataacaccttcaggattggcttttctcgggcaagtgaagcacaaataaaaaaaggttttgaaataataagtaaagctatatcagaattaaaagctaaataaaatagagtgctgtaaaaacacacttacagcactcatcaatatttctattttagttcctctaatttatgggacaatttaagattttcgctataatcaactgcacaatcaattactgatggaaccttctgactaaacgcctcttctaatgtaggtatgagctcttcagctttagtaattctatatccttttagtcccatactctctgcgtacattttaaaatctggatttgtaaagtttatatacgctgattctccgtatctttcttcctgcttccactttataagtccataattactatcattaaatattaatgttacgaatggggttcctattctaagtgcagtttcaagctcttgtgaattcatcatgaagccaccatctcctgtaactgcaactacctttttatctggatttacaagctttgccgctaaagctcctggaatagcaattcccattgatgcaaaaccatttgaaattatgcatgtattaggcttataacaatgataattcctagctatccacattttatgagctcctacatcagatattactatatcatcctcgcccataactcttcgtaagtcgtatagtaccttctgtggtttcattggaaagctctgatcatcactatattcctcataatttttatgcatatcttcttttattttaagtgcttgttttggtgtctctattctatctgaacgtcttattatttcttgaatcgaatctgaaatatcacctattacctcaacctcaggaagataactattattaacttcggcttttttctcgcctatatgtattatcctaatttctccctttgagttccattttttgggtgaatattctactatatcatatcctatagcaatgacaaggtctgtcttttcgaaaattctattaatataatctttttgtgcaagacccatactccataatgaaagaggatgattaaaaggaattattccttttcccataaaggtatttgcaactggaatgtttaatctttcagccatatctaaaactgccttacttgcctttgaacgtattgctccatttcctgaaagtattagtgggcttttagctcttgatatagctatagcagccttttctatactactgtaagcagcaaagctcttatccgtaactgtatgtcttaacggttttccttgtacaggcatatctgcgatattttgaggaagatctatatggcatgctcctggtttctcatctacagctgttttaaaagcttttctaactatttcaggtgcagtatctggtcttactatttgtttattccacttagtaacaggtgcgaacatagctactaaatcaaggtgctgatgcgactctatatgcattctatcagttccaacctgtcctgttatcgcaataagcggagctccatcaagattagcatcagcaacaccagtcattaaatttgtagcaccaggtcccaatgtagaaagacatactcctggtcttccagtcaatcttccatatacatctgccatgaaagccgccccttgttcatgacgtgtagttatgaattttataggtgatttagtaagcgcttttatgagtgccaaattttcctcacctggtataccgaatatatactctacattttcattttctaagcactttacaaccaactcagctgtattcatactactctcttcatcttcggtttttgaaatttcagaatccttgtcttgctttaaattttcattcatagatattaaccccttattctcactctaaattatttttttaaaaaaagacctttaattgacaatatttaaatatatattccagtttatcttttgtcaatatttttttaaaatcaatcaaattcaagagaatttcagcccattaaattacatttattgaatttttatgctcaaatattaatacctatataagcgaaaactttattttaaaatgacattacatttattgtaaatttatgtgattttgaattttacatatatatattattcaattcttttttaattgcattatatatcagcctatccttcattcccccatagaatcttataaactcatttatagcaactactggtagcatatatttttttcctattgcgccttcaacgtatttatatttatttatatcaatttctgacacatctataaactgtacctctacattagctgctacatctgtttttgctatatattccttaaaagcttcatattgattgtacattgattcactattaccacagccaccagaagaacatccgccctcgcagcttccttgactactgcatccactacaacttgaacatgaactattttctgttttgcttgaacaaccactacacgaagctttttctttaactccaaaaatttctactaacactacctcattttccattatggcctcctaaaattttactactattttagtaaaactaactcaattatagttagtagattattatacaataaactttgcaatatataaagtgacaagttatgaataagataaaaaattcttacttaacttgccacctcatattatagtatccttagtatcccattaagcttattactatccagtaatctttttaaaaagtccttttaattttgatccaccttgttctgaagcttcttctatattagtaacctcatatcctgcatcctcaattgctgtctttatcttttcatcagttatattattagatataaaagcagactttctttttaagttcacatcgattttttctgcgcctattccctccaaagcttccttaacatgtgctacacagtgttcgcaactcattccttctattgatattttctttcccatttttatattcctcccttatacatttaaatttaatatatataatttagaagtattcctaaagcatatattcaggtttaaatctttttagtctcagtgcatttgttagaactgaaaccgagcttaaactcatagctgctgctgctatcatcggatttaatagcggtcctccaaatatatataaaattcccatagctacaggtattcctataacgttatatccaaatgcccaaaataaattttcttttatgttttttattgtctttttacttagttctattgccgttataacatccataagatcacttttcatgagtacaatatctgctgattccattgctatatcagtacctttacctattgccatacctatgtccgcttgagccaatgctggagcgtcattaattccatctccaaccatagcaactttttttcctcctgcttgaagctttttaacttcacttgctttatcttctggaagcacctcagctaaaactctatcaattccaacctttttagctatagcatcagctgatcttttattatcccctgttatcatagcaacttctatacccatatcatgcagctttttaattgcttttgcactactttcctttacgctgtctgcaacagctattattccctttacctgtttatctattgcaatatacataggtgtcttaccttgttttgccaagtcatctacataatccaacacacttttaacttctatgttgttattatccataagctttttatttccaagaagcactctcttactatctattaaggcttcaattccatgccctgtaactgatttaaaatcgctaacctttaaaaattccatccctttaaattctgcttctttcacaattgcctctcctagaggatgctcagatgccttttcaacagaggccgcaattttaagtagttcttcctctgaaacttcatcaatagcttttatatctgtaactttcggttttccttctgttatagttcccgttttatcaaaaacaatagtcttaatcttatgggtattttcaagtgctgtaccattttttataagtactccatattcagcacctttacctgttccaaccataattgctgtaggggtagctaagccgagagcacacggacaagcaattacgagaactgatataaatattgtcaacgtgaaagttagattttcacctgataaataccatgctaaagaagatattattgccaaggtaataactactggaacaaaatacccggatactatgtctgcaagcttagctataggtgcctttgaaccttgagcatcttcaacaagctttacaatttgtgaaagaacagtatccttaccaaccttggttaccttatactttattgagccatttttatttatacttgctcctataacttcatctcctggcccttttgaaactggaatactttctcctgtaagcattgattcgtctattgacgtattaccttctataactattccatcaaccggtattttactacctggtttcacaattactacatctcctggtttaacttcctctattgcaacctcttcttctttttccccttttacaaccaaagcagtctttggtgtcagtccaacgagcttctttattgcctctgaagttttacctttagaaacagcttccatatattttccaagggttattagtgttaatattattcctgccgattcaaagtaaagctgagctccattaatcccagtaaatatttgatacaatccaaataaactgtatacaaatgccgcagatgaacctattgctactaaagaatccatgttaggacttctctttataagagtcttaaatccaacctgaaagaattttcttccctgaaacataactggcaagactaatataagctccaaaacaccatatatcttttcgttattcattggatcaatagcactaggcaacataactcctattgaattaaatatcataggaaccatagcaattattaaaagtggaactgcaaatacagctgatattataaatctcttccataaattctttattaccttttcttttctttccttatcagtatctacagactccacttcttcagaagccttatagcccgctttttctattgcctgttttatatcattaatacttaccttagatgcttcaaaacttatacttaatttctctgtagccaggtttacactagaactagttactccttctagtttacttgtaactctctcaacagttttcgcacacgcagcgcaggtcatacccccaatagctagggttttatttgtagcctcagtaagtgctttatagcctgctttttctattgcctcttgaatattaggaacacttaccttatcatcctgaaagcttacagttaatttttctgtcgccaaatttacatttgcctcttcaacaccttctagctttttagtggctctttcaacagctcttgcacatgcagcacaagtcattccctctattcttaaagtcttagtatccaattaaaatccctccttagcttatttgctacttattctggagagaagctctataatttcatcaactttttcttctccattattattaagaaatgcttctttaacacaatgattaagatgttgctttaatataagcatattagctttttttaaaagtgcagaagctgcaacaatttgattagatacatcaatacaatatctgccatcttctatcatctttattattccctcaatttgaccttttgatgtttttagtgctgtaattgctttttccttttctttattcaattatacccctcccccctatagtccttttcttataaaataccactgcacttcttttttgtcaattaatattaatatactttatagattacattaatactatttatcttcgatctcatcaagagttattattttttaataatcgttattgactattttttcattgtgtagtatattataaatatacttaaattgtataaattaacaattataaagaatttgagtaatttctttataatttgtgatactaaaaaggaattatatattaaaggtggtgtactttatgtttgaaaatatatcatcaaatggagtttataaaaatctatttgatggaaaatgggttgaaagtaagacaaataaaaccatagaaacgcattctccttatgatggaagtttaattggaaaagttcaggccttatcaaaagaggaagttgatgagatttttaaaagttcaagaacagctcagaaaaaatggggtgaaactccaataaatgagcgtgctagaatcatgcgtaaagcagctgatatactagatgataacgcagaatatatagcaaaaattctttcaaatgagatagcaaaagatttaaaatcttctctttcagaagtaaaaagaacagctgattttataagatttacagctaatgaaggtactcatatggaaggagaagctattaactcagataattttcctggttctaaaaaagataaactttctctagttgaaagagttcctttaggaatagttttagctatatctccttttaattatcctgtaaatctttctgggtctaaggttgctccagcacttatagctggaaatagtgttgttttaaaaccttctacaactggtgctataagcgcacttcatcttgcagaaatttttaatgcagctggtcttccagcaggtgttttaaacactgtaacaggaaaagggtctgaaataggcgattatttaattacccatgaagaagtaaactttattaactttacgggaagctctgctgtaggtaagcatatttcaaaaatagctggaatgatacctatggttcttgagcttggtggtaaagatgctgctatagttctcgaagatgccaatcttgaaacaacagctaaaagcatagtatctggagcatatggatactccggccaaaggtgtactgctgtaaaaagagttcttgtaatggataaagtagctgatgaattagttgaacttgttacaaaaaaagttaaagaattaaaggtaggtaatccttttgatgatgttacaataaccccacttatagacaacaaggcagcagattatgttcaaactctcattgacgacgctatcgaaaagggtgcaactcttatcgttggaaataagcgtaaagaaaatttaatgtatcctactttatttgataatgtaactgctgatatgcgtattgcttgggaagaaccatttggaccagttttacctattattcgtgtaaaaagcatggatgaagcaatagaattagcaaatagatctgaatatggtcttcaatctgcagtatttactgaaaatatgcatgatgccttttatattgccaataaattagatgttggaactgttcaagtaaataataagcctgaaagaggcccagatcacttcccattccttggaacaaagtcatcaggtatgggcactcaaggaattcgatacagtatagaggcaatgacaaggcataaatcaatagttttaaacctataattttattctatccaatctcacacttataaagaaaccaatttgatccacttaaattggtttctttatattttacacataaattactcaccatctaccatttgttgtaataaacatataattatcttatatactatttattttgggaggcgattttggatgtttgattacaacttagaattaaattactttctaagaataataattgcaggtctatgcggagggctaataggctatgaaagaaaaaacagaatgaaggaagctggtatacgtactcactttatagtttgcttaagttccgcattaattatggtagtatcaaaatatggttttcaagatcaaattggaataaaaaatatatctatagatccttctcgtgttgctgcacaagtagtaagtggcataggctttttaggcgcaggtatgatttttatgaggagacaatctgtaaaaggtttaactacagctgctggagtatgggctaccgccggtgttggtcttgctataggctctggcctttatctcataggtctcttgtcttcttttataatattattaggtcagactattttacacagaaacttttcttggctttcaacaccaagaactgaagaattaaatatcaaggtaataaatgaaccaaatgttgtagataagattcgtaatatatttactagtaaggatattgttatattaagctttaaaattaaagatggcaatgataataacttcgataaaccaaaacttatcaatatgagctttgtattaaaggttcctcaaacctatgacacctcggattttctttcaatgattcaaaaatacccttttataaagtatattgagttttaaaatgtccctattttcaaggggcttatttttattatataataaatctattcgaatattttaaatcattaatggaggctttaaacttattatgaacgattatgataacaattctaatataaatgaagatgcatggaataaagaaacatactctgcatgggttaaacgctttggaactccagatactgctgcaaaaaagatatctaaggacccttcaaaaattttatccgtcttgcacgaaaaacttggagatgtaaaagggaaaaaaataatgaacattatgggttcaaatggtagtaaagccgttgcccttgcactattaggtgcagatgtaaccgttgttgatttttcaaagggaaatatggattacgctcttgatttagctaaagaagcggatgttaaaatagattatattttaagtgatatattaaaacttccagaggataagctaacagctgactatgatatagtttttgcagaaatgggtataattcattactttattgacctaaagccatttataaaaacaataaatagacttcttaaagaaggaggcttatttgttcttagagattttcatccggtatccaccaaattaatcacatctagaggctcaactgcaaaggttagaaagcataaggttacaggtgattactttgatacctccttagaagaaaaagatgccgccttttcaaaatatcttattgataacaaagagcctgaaaaggtgcttttaagaaaatggactttaggtgaaatagttacttctgttgccgaaggtggttttaaaataaaaaaattagacgaagaaccaaacttatcttgtgataattttgataaaggtataccaaagagttttactttaacttcagaaaaacttagttaataatttaataattatttgacatttgccttgatattttatagaattaatttgaaatatattaataattttataaaataggaggcattttttatggaaaccataattaaaaattacagtctcttaaaaggcataatccataaagaactttatgataatggaaatataaaaagctttatattagataaaaaaaatgagctaccaacaaattacggaactcttattcctcaatacgatagttcttacgaaagacgtaagtatatagactctgtttccttttataaaagtggaaaactcaaaagtatttatttacaaaatcaaactactataaatactcctattggtaaattaccctcggaacttataactttttatgagaatggtgctttaaaacgtgtttttccccttaacggtaagctcggaggttactggtcagaacaagatgaatatagtcttgctgaagatacaagtttcaatttaaaggtaggctcctttaataaaaaaataataaacgtatatttttataatagtggtaatttaaaaagtattaccttttggcctaaaaatactcctattatagatacacccattggcaaggctgaggttcgaataggtttatccctttatgagaacggatgtttaaaatcttttgaaccaaacaaaccattattactgcaaactcctattggaaaaataactgcctacgactcaaatgctagtggaataaatggagatttaaactccgtgaatttctatgaatgcggagatttaaagtctttagtaacttcctctgataaagtgactataacttcagtcgatggtaaaaaaacagtctatgaacctggtttaagactaagtataatagacaataaatctctagaggttatacctctaaatataactttttatgataataaggttcagtttaataacagcaaaaaagacgaatatgatataactgcatcaacttttactattgaacatctatcttttaaacaatcctctccttgtacaaattgctctaaatagaaataaaaaataaggtaatcttatgcctagattaccttatttacatacttcttaatttactttttttctttgaatagcctgctgtttgtaatttactatattatctattatataaaccggcctctctttggtctcttcaaaaattcttgcaacatattgtcccattataccatgacttagaaaagcaataccaaacataataatgtttaaagataagattaatcctaaactcaaaatatgagttccagatattaaattttttgtaattacaattatagaagcaattacacctataatcgaaaaaagagatcctacataagttataataccaagcggtttgtatgaaagtgaggttattccatctagtgctagcttaatcattttgtttaacggatattttgtttctccagcaaatctttcatgtcttacaaactctacataggtttgcttaaatccaacccaactcaccaatcctctaacatatctactcttttcaggtagtgaagctagtgcatcacatacttttctatcaataagcctaaagtctccaacatctacaggaacatctacattggtcatacctctcagaactctatagtacatactcgaagtaaatttcttaaaaaaggtttcaccttctcttttagctcttttcccgtataccacttcatatccttgtttccacttctcaatcatttgcagtataacttctggtggatcttggagatctgcatcaattaccacaattgcatgtccgattgctacattcattcctgctgttatagccgcttgatgcccgaagtttctagaaaagttaacaagcttaactctatcatccttctcacaaattaactctacctttttccttgttgaatctatgctcccatcattgacaaacactagctcatattcttcatttgtcatatccataacttctttgagcctcttataactttcaagaataacaagctcttcattaaatatgggtacaaccacactataaattattctgtatcccataacacttcacctctcctagtttcttgattgaattatactagaaaaatacagttacaatatggaatatctatgtgatttttatgtgatttataataggtctgtactattgtagactggacattttattaagaaactaactccaacttctctattaactgctctaatctctcctccataaaagttaactatcttttttgatattgcaagtccgagaccaaactttcctttcttatccttgtatagattatcaaatatcttctctatgcttttttctggtatatgctctccatcattgtatatttctattattgcagaattatcttctctcttaagtctcaatattatctctctcttcgcatatctaagggagttttctagtatattttctatagccacctctattttttcttgatttccaaaaacattaatagtgtttgagatgatatctggtttaatatcacaattaaaaaccttaaacctatccaccattttgtaaagaagatctcttaaattcactatttcattttcaacgttattctctagtacatagtcgagtgtatttaaatacaacatttgcttgattttcttttctagcctaatagcctcatcttttattatctctgctgtcctctcaacagaatcaatataaataccatcaataatagcctcggcatgactcattataaccataactggtgtttttaaatcatgggatatactttgaagaaacattttttcattctcatccgcatactttaattgtttctgcataatattcattgagttagcaagacttcctatttcatcatcgcttctaacttgaataggctctttccaatccttatttgctatttttttcgtataactttctagctccttaagcggcttagatatgtgtccagctacaatttttgcagtaaaaaagcctattattataaatacgattccaactataccaacttgatataatatattgttatctacaaagtatggcatataagttataagatatgtattttttccatatcccacgctagcatgacttataataaaaagcacctttatgcctttgtaatactccttgaactccttatccgaatttccagccttagataagtactcaatcatccactttctcatatcactgtcatgcatcatgggacctccacctaccggattttgattcacattttgcatctcatattcatcagccttaactgttactataaagctttgacttctctctaagtttcttaatttatcaaatcttaaaggtttatccgtactactatttttaagaagcatatcatgggcagtttttaaatcctgtattttttcattttcatcgaaagctctaaatgctgatatatacaatagtgaaatgctgcaaactattatgagaatcataaccgtaaaggtcatccatattctcatagttatggtctttatcttaaatattttcactgtcttaccaccaatttataaccatagccgtatactgtttctatggttagtttatttatcttttttcttagccttcgtatagtatcatctacaactctgtctgaaccaaaatagtcatctccccaaacatttactaatatttgctcccttgaaataacattatttttattgtctgaaagataacttaaaagttcaaattctttgtttgtaagctgcagctcttcatttctaaaaaaaaccaacctttgtttcttacttattgtatattctccaatttttatatcatcttgattttcttgatctttatctccatacaatctttccataagcttatttgttcttataactagttctcttggcaaaaaaggtttggataaataatcatcacttccaagctctagtccaactactctatccaattcttcgtttcttgcagacataaatatcacaggagtagccttattattttgcttaatgctcttaataagctcatatccatctatatctggaagcattatatctagtatccataaatcaggcatatcttttattctctctttagcagaattaccgtcagcaaatgtagttacactgtacccttcctttgtaagatatttatcaagtaaaatatttaaactctgttcatcctcaactaaatatattctcttgcccaaaatcatcaccccaatttattattgttaaataaaattttatcatatgcatttaaaaaaaacgtgtgaaaaatatgtgaaattgcataaaaaaaaggaatactttttataaagcttccttataactattttacccattatttacgttttcaattatattagaataaaccaattccttgaagccaatttgtaacttgctgtttatcaaaatcactcattgctgcaaatccagaaagaactgttgatttgggacattctttttcaatgtttattttgatttgtccaatccctccaccaccgtgagtacaaaatggaataatagtttttccttgaaggtcagcatttcttaaaaaacttaatataggcggagcaaatgatttaaaccaattaggtgttcctaaaaaaatgtactcatatggttcaactgattcatttccagatagtaatttaggacagtatcctctctcaacttcattccttacttcctttgttgctgtattgtaattaaaggaatatgctttttcaggaactaattccctaatatctcctccagtttgttctgctatttcccctgctaatttttttgttgtattagaaaaagaataaaacactactaatatattgctcatttttacctcccaagtttcttatctttccttaaaatataacatatccactagaattaagtcttaaaatttcactaacttaccactaaaatatttttttgtaagatcaataaccctattttcccaggaatttttttcgaatatatggtttgcaccttctacaagttcaagagaagtattttctccatacatttctaggtacctttcagaggtactaagtggaactatttcatcagaagttccatgaattattagagattgcttgttataagctgacgctctatcaaatatattcacctttttaatatcctctaaaaatttctttcccagtaataatccttctacatcatagattcccttttccataatctcatcatacttatctccaatgtacgtatcagacaatataatctgctccatatttccagctggtgcccataagcatagagtatttatttcatcttttctatcccctgcaataacacttgctatcgctcctcccatactgaagccaagtattgatatcctatctttatcaacaaactcaagtgttttcacataatctaaaattacattagcatcataaacctcattactaaaggtcatatcaacaaattctccatcactttcacctgttcctgcaaagtcaaatcttatagtagctatccccaacttttctaattcccttgctaacttcacaaatatgaaatgaggccccattttatttccgcaaaacccatggtatattacaacaataggcaatttttctctagcctcaagtggcatatgcagtacacctcttaatgttaagcttttactttttatttcaactgacttctgcataataatcttcccccacatacaaatattttcctagtaatcatatatatttagtatatgtttttgctatgcttttgtcaatatattaaaatgggccattaaatttcatcattttatcaatgtactttcgaagttaaattcaatccaactactcctactattattagtaagatacataatattttactaatattaactggctctttaaatactaaaattcctattgtaactattaaaactatgcctacagcagaccatatagcatatgcaactcctatatctatcttctttagtgcaagtgtaagcatactcaaacttaggatatagaaaaccatcattacaatagcatatttaaaatcactaaatcctttagactgcttcataaaagttgttccagaaacctcaaatattatagctaaaatcaagtaaatccaactcattaaagttcatctcccatattttcaattacattttcaagtaaactatccagttcagtaatttgcttactgtctagttttttagttatggtatctgctattctttcataaatcctattatctccctcaattatttgcaaagctttatctgtaagctttaaatagtaaatccttttatcttccttggattgcacctttgtaataagctcgcttcttgaaagccttttaactagagctgatattgcaggttttgttagtttaagtttatctgcggcctcactcattttaggatttttaagctcgtgaatcatagttaagtaatagtagtcattcatattaaaattactgatttctgcttctgacaaagcattttttatatttttaatagacttttcccacatataattagcgataaccgcaattttttcttcaagcataatatacctccaaataaaaaatggttaaaagcatttaattaaatacttttaaccattttatcaattatacaaaataaaatcaaatttatactgccttatcttttaacttgtctaaatcactttttgatttttttttactattataaaatctaaaagctgttattataactcccattaaacagaacacacctgcagcgatgtacacccatttcattccatacataaacacatcgtctctaccttttatataatcaactactctgtgacccattttactgctcattctattatatagaagaagtgttgcaaaagatgtaccaacaacaaagcctaaatttcttattagagcattaacgcttcctgcaattccaagtttgttacgaggtaccgtagacataactaaactattgttaggcgcttgaaacattccatttcctattgtcattattactatatatgtcattaaaagtgctactggtgatgctgctgtcaaagtacttataagaaataatccaacacttgttaaaaataatcctattagtgttaaaatttcagaacctattttatctgaaagatatccgctaaaaggtgccactatagataacactacaggagaaaccaccataaaaattccagtcatagcagcagaaaattttaacgtatcttgaaaataaaatggaagtattatatttgaagcactaatagctgtaaatgatgtaaacgcacatataacactaactgagaataaactgtttgaaaatatacttaaatccaataaaggttgcttcttttttatttctataatcaaaaatgctgcaagagctaagaaagaaactataaatgctaaaataatatatatattgctgtatcctactgtttcaccttgaactaaagctccaaataataatactgtaaatactgtaaataaaaccgctccagtagtatctaatttttcatctaacttatcatttgttttaggaaaaactttaatacataatataaaaactactattcctattggtatatttattaagaatatatactcccaacttgcgagagatattataagtcctccaagtggcggtcctatcattgctcctaatgctacaaaagttccaagtaagcctagggctcttcctctttcatttggtggaaaggtttgagttataattccttggttagttgccatagttgctgctgctcctattgcctgtattactctagctactacaagtactacaagagaacttgtaaaaccgcataaaagagatcccaaagtaaaaagaattactccaaacttaaataccttcgttttacctattatatccccaagtcttccaaatattaaaatcgttgctgctactgttataagaaagcttgtaacaacccactgaattgatgctccactaacatgaagcttcaaagtcatattaggaagtgctacatttacaatgcttccatcgagtgttgccataagtgttgcagatagtactgtgattaaaattatccatctttttttatataattcattttgcgctgtattcacgcttttttcaccctttcacaacatttctttctgttttcttttgcattatttaaaactttttctaaaaactttattcccgtctctatttcttcttggctacttccttcaagcaaaatatcaagtaattcacctattaccttaaaaattttaggtattacttccctacctttgtctgtcaaataaagcttatatgctcttatatcatctttattttctaccttagttatgtatccaatttctataagcttttttatacttcttgcagacatggctttatcaacacttaactctctacttatatcattttgacttattccttcaacatgacttaatctaagtaaatagggatatgttcctactgttagttctagttctctcagccttttatcaagaaaaacctgattacatctatataagctattagttagtcttactaaattgtttaaatctatctccatattctctccttccataaaataaattatcacaatatagttgattagtcaaccatatgaaaacatatacataaaaaaacagcagataataaaatattacctgctgcaaaaataaatttaatatatcataatcttactttattgaaccttccaccattccaccaataattctacgttgaaatattatatatacaattattattggaactattgatgatatatacagtgcaaacattggaccataattcatttgatttgctgccacgtaattgtattgaaaaagagtaagtgtccaatttccattatctcctccaagtatcaaaaatggcagtagaaagtcattccatatccaaagtgcattcaaaattattattgtggcatttataggttttaaaagtggaaacactatttttaaataggtctttaatcttccacatccatctattgatgctgcctcctcaagctctagtggaagatttgccttcatatatcctatatacaaaaacatagtttgaggaatagacaaagaagcatatataaacatcagtcctattttattcatagcatgtaaatgggctgcaactgttgttagcggaagcataaacacttggaaaggcacaaacaatccaagtaagcagaacatatatatagtcttaaaaagtttactatttttacttctaactatcgcataggagcctaaaggaacaattaataaaattaagataactgagaacactgttatctcaatggtatttaaaaaatatccaaagaatccagaattaaaaactgttatataattttcactaaaaaaagatcttggaaaactaaaaaaatctgcgatagtatctgctcctgttttaaaagaacctattagagttaaatagataggcaaaaatataaagaaaaccgctcctagtgccaatacaatataagttaatatatttgcttttgatttattattttccacaatacttttcatcactgttccacctcatatctacttgaaacttttatttgaaccaatgaaagaattattataataataaatagtagtgttcccattgaatttgcatatccaaacctgaagctgcttactgcatcattatataaaagcagccctatagactgcgtatcaacgcttccgtaagttaaagcaacaatttgatcaaatgctaaaagcccagattttaaagctagaatgaatactatactgagcgtaggaagtaaaaatggaagctttattttgaaaaatacctgcataggtgtcgcaccatcaacagaggctgcttcaattatatctctaggtacgctcataagacctgctaagaataacagtattggaagcgctactccctgccaaagcattacaaatgctattgcaataaatgctcctgtgtgattagataatggatttagcttaaaaggatttatattgaatgcattcccaacttcaggaatgccgtattgaaatatttgactaaatattaagcttacagtcattccactaagtactgctggaaagaaatatgctgttctgaaaaagctattaaattttatttttctttctaggagaatcgcaatgccaagacctattataatttcaaatactatcaacacaattgtgagctctacagtaaaagatatactctttgagaaatcgttatcattaaatagccctatatagttctttaaccctataaaacgcttaaccttagataacccatcccaatttgtaaaactaataaatatcccttgaattagtggatacataaagaatattaaatacaatatagccattggcaatacaaataataacctccagtacctatttacaaacctagaaattccactttcttgaacagaagaattcataatttcccctcccaaatttaattctcatctgccattcttttttcaacatcaaaatattgatttaaactgttatataaatcatttttgttctttgttatcatgaaatttatagttaatgtctgtattggactttcaccctgcttccaatactgatgtatccatggtacatgatgctttggatcagtataaagtttttctattccttctagttctggtgttctccctttagtctttactccttttacagaggttttatttccatcaacatcataatatttttgaaatacctttgggcttgttaaataattcaagaatgcttctacagctttcatgtttttaacgtgattacttaccgataatgataaatctgctgtagaaattatggcttgattgtcatctgtagtacctggaaatggcatagtttttattttatctttaggctttgcctgccttattaaaggaagtgaaaaagttcctgctggaaagataagtccttgttctttaaccaatgctgttattgcatctgctgcttttgctgtgccataattgctttgtgaattatctgcaacaaaagttaatatatcagataccttattaaatgctgaatcatagccattggcttcattcattgataattcttttcctgaaatcttaagttcatattttccaacctcacctttaggagaatttagaaaatacctatttgcgctatcagtgcttccaagcacctgctgccacaaagcttcatgcataccatgaattaaatatggatctgacccacttaaagcaaataaggaaagtttatttactcctccttttttatcctgattaaccttactcgctaacttctccatgtcctgccaggttcttggcaaatattgaccatttttatcttcatccttttggctctttccataaagctctggtttatcgtatccatacttgtgaaacaaagtttcgttataatacaaagcttcacatgaaaagcttaaagggagcgtataatagtgcttttttctaagtttgtcctttacttcatacatatctaacgcactcttgtctatattcttaacacaagaaagacttgttacatctctaagttttccttccctttggaatatattataagcggtttgtcctggataaacttgaaatatatccggtgcaacatcatttctaaccctatcatttattatagttgcagcttttgatggcgactcaaccttcactttatatcccgtttctttttcaaaatctgaagctatatcttgaaaagtattaagcatttcaaatttttctacaaaaaaatcaacatcataatcatcattttttatagaaacgcaccctacagtactaaaaattatacaagttataatagaaaataaacataattttttgagccatcccattattttttaccccctatttcactagttaaattaaatcgtttacataaatgattttaagaagactttcctcaataagtctcctatgctttttctatcatctattaaaatacaatactatttatatttacctgtgtttactaatttcaaattacatcttgttcaattaaaaatgctttttgtataggcaataaagccgctcctaaaattgaggaattccttttaagcctagatgggaatagcttaaaatcacctctattataaaactcattttcatcgaaaattttatccttaagactatctaaataaacatcagaatatccacttatttctccccctagaactatataatgagggtcaaaaattagaactatattttgtatacctgatgcaagattgtttaagtaattatttagacatttctctgcaactttattttttatcattattagattaaaaaactgctctaacttagtaacctttacatcacttaattcattaaattcatctaaaagagctttttgagatgcatacatttcccagcacccttttctcccacatctgcacagttttccatgaggaactaaggtcatatgacccatttctccagctctcttgttctttcccttataaagctgtccctcaatcactattccagtacctaatccgcttgaaactgatatatagacaagatttctctcctcttttgctatacctatttttagctctgcaagtgctgcagcgtttgcttcgttttcaataaatagaggaaattgaaataggttttcaaacaatttaaaatcccagtccttaactcctatattgatagctcttttgagtactagattttcctcatcaactgttccttgaagtgagaatccaattccaagtaccttcttctcatcaatctttgtaaactccagagcctctttaactataagcgatatccttttcattatagatttaatatccttaagctcttctattaaaaactcaacatcatacttaatttctaagtcaagattagttaaaactactcttgccatatatggatttatatctacaccaaaagcatatctactatttggaataaagctcactattataggtttccttccccctgtagagcttgctactcctgattcttctacaaagccttctcttataagttcattcacattggatattactgttggaacacttacaccaatctcatttgatatatcaagtttagtaagctctctttttctatataacaagtttaaaattttacccttattggaattctggtctatatcaaacatatcgcaccaaccttaatcactagtattttactttaccttcatattgtaccatatactatatccccacaaaagcctttataaagttgttttataaagtatatatactatgtatattttttcttatatagttttaatacaaaaatgaagtaaagatatcaattatatatctttacttcacttacgttatgcctctttttttatatttttaaacatctcagaatagcaataattcataatatcgcttctttttattatgcctataaatacattattatcatcaacaacaggaacaaaattttgacttacagattttgatataagatcctcaatatcagaatctatatgcacaggtctattattcatgtgtctcggtatatccttaattgaaaccttatttgtcgtttgaaaatcaatctccggagtattttttaatttccacaataaatcgccttctgttaaagttcctatatatttcccattatcatctaatataggaattgccgtatatctatgatattccatcctctctagtgcttgtctcatagtagaagttattttttcatatataacctcgttcttaggagttaaaaaaaatgctatattcatagatttaaacctcttttctttttaattaccctgcccatataacatatacattgttaaatattttactagaaatatattccccctcctatttataatacagattaattttttcactgaaataaacgatttttaaactttatatgaatattgaattaccatttttacagttcaattttatgttatcatagttatattaaaagtccaacattaatttttaaaaataatccgctataaattaaggcgtatctaataagacttaatttatagcagctacctatttcactagcatgtaagataattctttatatgtatctaattattttagtctcctattttgttaaataatacaaactcaaatcaactttcccattatcagctttatatccgcttatctttaaaggcgatatggattctttttttacactaatgctgttatcttctatacttatataatcggaattaatcctttttagtatatccggataatagcttttgggaactaaaattctacctacataaacactctttagtgtaaatttaatgctttcgtcctccattgaaggaacaaaattaaatataacctgagttggaataaaatcaattatatttgtatttgcataaatttttatttgattattatcaacagtggtttttaaccctgttaatttaatttgattctttacataactgtataagatattatttaaatcatcttggcctaaagttacacttgtatttattctgttatttgtaatactcatcttaggatttaattgtgtaatctgatgatttatacttcccttgttttgtggtagtgatatttgttcaactggtcttatagaatatagtatccatacaattaaaaggactattattataattggaatatttatttttgttcttttctttaacacagaacccctccttaattatttttatgctaaatattgtaatttattactttttatgttaatatctatgaatgaaatcaatttgcgaggtgaagtattttgaaacgtaattttatgaaatctatcatagaaacattatctttcaataaaagagccatttctattattataggtctttgcattatatttacaggctcgattttcatttcatcatatcataaatctagaaatattacagcaactaatttatctacttctaaacataaagcacaaaaacctaaaccgacaaaaaaagaaaatgaaaaaactgaagttaaagatactcaatcaaaaacacaagttgtagctgctacagcttctgcccagaatacaagtaaatcccaaagattatatacaaataaaacaagacttatagataaactcccattaaaagatagcggtcaagctattatcgttgaaacccctaatgaatctagtacagctatgaaacttttcacctatgaaaaagataattctaatacctggcgtttaaaactaaccacaaaaggtgttgttggcgtcaaaggtatcagtttaaataaaaaagaaggagatcttaagacccctgagggaatctttggctttctgtttgaatttggaagtgctccaaatccaggcactaagatggaatataaaagaacacatcctggtgattattggtcttcttcacgtactataaaggaatataacacttgggtaacctataaaggttctcctgaaacccgctttggtcatggaaactaccaaaatctttatacaacttcatcatacaaatatgcagcagcaatcaattataattatggaactaataaaattattggaaatgggtcagccatattttttcacatagcaccacgaaatggaggtggaactcctggatgtgtaggaattccagaaacatctcttgtacaaattttaaaatggatggatccaagcaaaaatccaaaaatagcaattggaacagccaaatacttatctagtctctaaaatttttacagcttattgcttaagcttcccttaggcaataagctcttattattatatgaatgcacttcaactctatacttatcacaaaaattcctatttattattattttacatgtaaataatttatatacatcttatattaactatgatttattttgatttttaataaataaagattttgccgaactaaaatcagttttgcaaaatccttattcatgcactttattcatcaatcaatctatagccaactccaacctctgtatagatatactcaggctgagctggatccttctctatttttcttcttaggttagccatgaataccctaagggactggttttcattgcctactgatgctccccatatttcgtttattataaaattatgagttaaaactcttcctgaatatttacatagtaagaacattattttatactctattggcgttaaatgaacttctttcccattaacagaaactcgtcttttctcaaagtccacagataaattctttactttaaaaaaatcaatagacttatcttttgcctttcctgcatttacatgtcttaacgatacccttatcctagcaagaagttctcctataccaaaaggctttgtaatatagtcatctgcccccttgtcaagtgcttcaaccttttgacgctcattttcccttgctgaaacaattattatgggcaccttagaccattcccttatttttcctataacttcaataccatcgatatcaggaagacctaaatctaacactattaaatccggactattagccatagaaagtgcaatagcctcatttcccttatctgtttcgctatatttatagccttgtgttgaaagtgctgtagttataaaatttcgtataggtttatcatcttctacaacgagaatataaggtttattatccatcttaacgcctccactataactctttaggaatattgaacttaaagatagctcctccactacctttgttaacagcctctatttttcctccatgagcttctactatagacttacaaatagccagtccaagtcctactcctctccttgaatctgatattttgcttccatttgtaaaaaatctatcaaatatattaggaagtatatcctctgaaataccctgtccttcatctattatttcaaaaacaacatccttctttttttcgtaaaccttaatttctatagtagaacctttaggtgagaactttgaagcattatctaaaagatttattataacttgttcaattaagcttccatccatcgataccattataacatcttctggcacacttacttttatcttatgatttttgaagtatttagagcttctttgcactgcttcggaaacaacctcttccactaactccacatctttttttatttttgtattcccctcatcaaactttgtcatactaagcaaattctcaattaatcttataagccattcagtatcttcatatattccatttataagctcctgttttctcttttcatctataagttctccattttcaagtatagtacttgccgctccctttatacctgcaagtggacttcttaaatcatgtgagattgatcttaagagattgcttctaagcctttcacgctctatttcaactttagatttttcttgttcctttgaaagtatctctctatcgagggcaatagctatttgacctgtaactgtatcaaccacagcctttttttgaggtcttaaaggaccacttggacacgatacacctattactccaagtactttatttttaatttttataggaatgtagtacccttttgctctataaaaagtacttgttccacatccagattcttttccatttaaaaaggtccagtaggcagcagcattttcatccttactcatgatgatttcttccttggctcctttatcctttttatatacaaatggtgttgaaagcttattactagtgtctgccaaatagcatattacatttctattaactaatcttgatatatactttatacctatggacacaacctcggaggttccaacagcactcaatagcttaccacttactatatacaaagtttgagtccttttttccctcatattagaatcttgagcttccttttgcaccttattagtaagacttccaattatgaatgcaacaatcatcattattggaaaggtaacaagatagcttttatcataaactataaaagaatttttaggttcagtaaatctataattgaacactaatacagctgctatggatgatattatccccataatttgccctttagttgccatatatacaattattacaccaagtataaatatcattataacattgacatccttaaagcccatgtaactaaaaagttcagctatatctgtagtaattgccataattattattgcttttaatacatccttaactgatcctttatgctgaatacttatttttgataaaatactatttttgtgatctctataataagatgaattcggtatcatatagacatctatataagaatttgaatccataagcttatctactacatccttagcataaaaatgcaggagagttcctgttcttttatgattttttcctattactattttagtagtgtttctaagctctgcatatcttattatttggtctgcaacattttctccatgaacagtaacaagttccccacctaaaagctccaccagattaaaatttgcattgagggtttccttatctgctttacctaagcttctaccagtatcaacataaagtgctatccactttgaatggtaggattctgccatccttgcagcagttcttattattcttgccgaagatggtgaggttcctatacacgcaagtatttgatctgaggttgccattactgtaatttgaccctttgataatcttgcaatttctatttcaaaattaactctatccgcagttcttctaagggcaatttctcttaatgcatataaattattcttagtaaaaaaattattgaatgcccttttaacctgctctttcctatatatcttaccgtctgtaaatctctttaaaagctcatctggttctatatctattaattcaaccttatctgcatcatcaaataccttgtctggaatagtttctcttactgaaacatgagttatatttgcaactatatcatttaagctttctatatgctgaacatttaaagtggtgtacacatcaattcctgcatccaaaagctcctctatatccttccatctttttttattcctttgactttttgcattagtatgcgctaattcatctacaagaattatttcaggctttcttaaaagcgctttatctacatcaaattcccttagtataactcctttataatctatattttttactggtatctgtggaagcccctttgtaagtgacattgtatccatccttgcgtgaggctctatataccctataactatatcctttccaagttctttcatatagtgagcagctctaagcattgcataggttttacctacacccgctgcatagccaaaaaagatttttaatttgcctctattcttatttttttcttccttatctattttgtttaaaagataatatggatcaggtctttcgtagttgatatccatataaattcccccattttaatatgggtaaaccgctcaactattatgacagcttacccatagattacactactttttataataaatatcattccccagctttaatgagttccccttgaaaatgcctttaataacacttttacctacataattatatttattatcaatccttatttttatcctattatctactacaagatactttgcttttgtagagaaaacatctctatattcattatttataatagtacagttgtcatcattattattcaatattaaaatcacatttcctctttttgataaatactttcctgaataaggattgaatctatattcccttaaacttctaaataaataatagctaattgaacctactataaacaataaaacaactacaaaagtgaattttctcattattactcacctattttactattctttagcattgaagctacctcaagattaaccttaagaacatttactctttcctctccaagtactcccaaagtcctaccttctgtacatttttttattatttgtttaagtttactttggcttatgcctgttgcctttgatacagaaggcacttgaatttcagctgctttagggcttatatctggatctaatccagagcccgagctagttaaaagatctgtaggtatctcatccttcttcactcctggatgagtttttaagaaatcatctatatcctttttaaccctattttttaaatccttattggatggagctaggttctgtgaaccagaggccacttcatccttatttgagtcatttttagtgtaggtattataatttacagaagaaactcttcctctaaaaaatcttttatccgtaaagttttgtcctaaaagagcagagccaacctccttacccttaaaggtaactatgcttccatttgctttattatgaaaaactgtctgccctactgccgttataaaaagtggatatataagtccacatattattattaaaacaatacctaatctaagagcacttttaaaatatttcatcaattaaaccatgcctccttctatcctaaattaaggattctaaccattggggttattatcatatcaattatcttaattccaacaaacggaactataattccaccaaaaccaaatacaatcatatttcttaaaagaagagcttctgatttcataggtctgtactttacacccttcattgcaataggtattaatgccggtattattatcgcattaaatataagtgccgatagtattgcactataaggagtagacaggtgcattatattcattagctgcatttttggtattgctattgtaaatatagctggtattatagcaaaatatttagcaacatcatttgctatactaaaggtagtaagcgcccctcttgttattaaaagttgctttccgatttctacaacctcaagcacttttgtaggatccgaatccaaatctaccatgttagcagcctctttagctgcggttgttccactattcattgcaagaccaacatctgcctgagcaagtgctggtgcatcgttagttccatcacctgtcattgcaacaagttttccttcgtcctgttccttttttatagcttctatcttatcttcaggtttacactcagctataaatccatccacaccagcttcctttgctatagttgcggctgttaaaggattatcccctgtacacattattgtctttatacctatttccctaagcctttcaaatctctcaactaagcctggctttactgtatccttaagatatataactccataaattttattatcaacacatactacaagtggcgttcctccaagctttgctaccttgtttacagcttcatctaaatctttaggaataactccttttaactcctgtactcttttctttatggcatcatatgctccttttttaactgcagttccattttctagctttattccgctcattcttgtttgagctgtaaactcttcaaattctatactctcatattttttagtatctattgttatacctaactgttttccaagttcaactattgacttaccctcaggggtatcatcttttaaagaacacataacggagtaatctattaatttttgtttatctgcacctccaaccgttataaaatcagctgctagtctatttccataggttatagttcctgttttatcaagaatcattgtatcaacatcaccacaagcctctactgcttttcctgacattgctattacattaaatcttgtaactctatccattcctgctatacctattgctgataaaagtcctcctatggttgttggaataagacaaactaaaagtgctatcaaggttgacataggaatctttacacctgtgtatgttgccatagggtaaagtgcaaccaagacaattaaaaatatcaaagtaagactaacaagtattgtattaagtgcaatttcattaggagttttttgccttgaagcaccttctacaagattaatcattttatcaaggaaggattctcctggtgttgctgttatttcaacctttaaccaatcgcttacaacctttgttcctcctgtaactgatgcaaaatctcctcctggctccttcataacaggtgctgattctcctgttattgctgattcatctacagatgcaactccgtcaaccacttcaccgtcgtttggtattacatctccattttctacaagaactacatcaccctttttaagctcatttgcatttatagtttttatactaccatcttttcctatgagctttgctattgtatccttacgggtctttttaagtgcatctgcttgagcttttccgcgtccttcagctacagactctgcaaaattagcaaatagcaccgttataaataaaatgattgttacaattaagttatatactcttaaattgtgtcccttatctccaaatatacttggaaaaatggttaataaaattgtaacgaagaatccaacctcaaccacaaacataaccggatttttcatcatatatttagggtttaattttttaaaagactcaattatggcttcctttaatatatcctttgtaataaattttgactttttacttttcataatgacctcaccccttatgctttatagcgttagatactctgaaataggtccaagtgcaactgctggaagaaatgtaagtgctccaattataactataataactattaacgttacagtaaaaatagtgttgtcggttttaaaggttccttgcgttgccggtactgctcttttagccgcaaaagaacttgctactgctaaaagtattattatagataaatatcttcctagaaacataaccacacctgctgagacattccaaaacatcgtgttatctataagcccttcaaatccagaaccattattagctgctgaactggtaaattgatataaaacttgtgtaagtccgtgaaaacctggattcgatattcctgctagtccctgttttgttgtaagcgccaaagctgaagacattaatattaaaaatggatgcacaattatagcaaaagctactagctttatttctttgccttcaattttcttattcaaaaactctggagttcttcctaccataagtccgcagaggaaaactgttaaaatggcgtacattatcatgttcataaagccaactccaacgcctccaaaaattacatttagcatcatatttataagaggtacagctcctccaattggtgttagcgaatcgtgcatattattaaccgctccacaggaggtatccgttgtgactgtggtaaataaactagaccctgctattccaaacctctcttctttcccctccaggtttcccatgctctgacttaagcctatacgtgagagtgctggatttcctgctttctcagcggaaaaacatatagctgctcctgctaaaagtagtaccatcatagctgcaaatatggctactgcctgttttttcttttttatcatgtgtccaaaacatactaccattgatcctgctagtaaaagcagggttattatctgcactgaattggtaagcggtgttggattttcaaaaggatgagatgaattagcactaaaaaagcctcccccatttgttccaataagctttattgcttcaaggcttgcaactggaccaagtggaatattttgaagctttccttctattgtcgtaactgtcttatttgccgaaagtgtttgtggtactccctgtccaatataaaatatagcgacaattatagatagaggaagtaatattcttgttgtaattcttacaagatcaacatagaagtttcctaatttcttcttgcctgaaagtgctcttataaatgctaatgcaactgctattcctgttgcagcagcaaagaacataaaaaatgtaattactatcatttgcgataaataagaggctccagtttctcctgcataatcttgcagatttgtattagttaaaaagcttattattgtgttaaaggtgagtccttgttccattccctttacatgattaggattaaaaatacctactgcttgaattcttaaaattatataccctataattgctggaactgcattacacattaaaagtgcaaaaatatattgcttccagttcatttcctcttctttttgtatacctgaaagcttatatataaagccatcaatcttatctaatactggatctaataaagtttttttgtgctctgaaaccttgtacatatatcttcctataggtatacaaagaagtacgaacacaataagaataattgctatttgtaatatttccatatcttaacctcctcgttacctaaaatttttcaggattaaataatgcatagcacaaatatataaatagaaaaatgattataatagctaaaagtatcatattgaatcccccttaaaaactacttcttatttatggttccttcacaccagtttataaaataccttaaaaataaaaagcctagaactattaatactagaaaaataacatcaagcatatctatccctcctcttatcgcttatgccttcatcttaacaccatatatataaaatttgagttaagattttaagagcaggtgttaagaaagtataaagatttcaaatgataatgttttcaagcttttacgcaaaaaagagaagataaaattccactttatcttcccttgatatttcatttaattattaaaaactattcttgtttcccaggaaatatattatctctgtgcaaattaagaagctcttacatatatctttcaggtttattaaataacaaaacaagtttttattcccaattttaaaatataatactataattattgtatataaactatacatttatattaagtaccgtatacctatgaaaagctttttatcaatataaaaaatatttaattatcaaggagataaattatgaaaagaaaatacttgttgcttttaacccttcttttaacaatttcatttacatttggatgcagttcttctgacactccaaaagcctcttttgaaaaatacataaatgcttggaataaaaatgactataaaaccatgtatagtatcttgagtacagatagtaaaaaatctatttctcaaaaagattttgtatcaagatacgagaatatttacgatggtatcgaattaaacaaaatctctgttatgccagagtatccaagctcctataagaaagattccaagggaaatgtacctatcccctttaaggtcacaatgaacacagttgcgggcaaagtaacctttaatgacactgcttcttttaaagaatccaataatacttggtatttaaattggagcagcgaaatgattcatcctgatttaaaaaaaggatataaaataagaattgagaaaactcctgctaaaagaggagaaatcaaaggtacaaatggttcatatctagctcaaaatggatatatagagaatgttggtatagttcctaataaatttactggagatactgaagcttcaaaaaagcagattgcagatattttacaagtagatgttaacagcataagtaaaaagctttcagcctcttatgttcagccagatatgtttatatcaattgccaaattatctacagatgatacggacaagatgtcaaacctcttaaaaataccagggataatgattactaaaacacctgctagagtttatcctctgaaagaaaaagctgcaatgctgacaggctatgttcaaaacataagtgcagatgaattaaaaaagctcaaaactaaaggttatagcagagacaatgtaattggaaaagctggtcttgaaaaaatatatgagaagcagttaaaagcaactgatggagctgaaatttacattgatagtaattatgataaaaaaattaaaaccatagctaaaaaagctcctaagaacggaaaagatgttaacttaactatagatactaatatacaaagttcattgtacgatgaatacaaagctgattccggagcttctgttgcattaaatccaaaaactggagcagttctcgctcttgtaagtgctccttcttataaccctaatgattttgttttaggtatgcctagtgataagtggaacgcacttcaaaatgacgctaataaacctcttttaaatcgctttaagactacctttgcacctggttcaacctttaaaccaataacagcagctattgcccttgatgctggaaaattaaatatagatgaagataaaaaaatctcaggattaaaatggcaggaaaacagcagttggggaaattattttgtcacaagggatgaagcttactcagaacctgctaatcttgtaaatgctcttgtgcactcagataatatatactttgctaaaacagctcttgctattggaaaggacgcctttttatcagaaacaaagaagcttggtattggacaaaatctgcctttcgaatatggacttgaaacctcaaaaataacctcaaacggttcaataaaagatgatattcaactagcagattcaggctacggacaaggcgaagttcttatgaatccagtacagcttgcttcaatttataccgcatttgtaaacaatggaaatatagttgcgccttatttaaattctgataagggaactcaaagcaaggttttaataaaggatgcttttaaacctgatactataaataccataataaatgatcttacacaagttgtttctaatccagaaggtacaggccatggtgcatacatgcctgatttacctcttgcaggtaaaactggaaccgcagagataaagaaatctcaaacagatactacaggaacagaaaatggatggtttatagctgtaaatccaagcaatccaaagcttttagtacttgaaatgtacgaaaatgtaaaaggaaaaggcggcagtggttatgttgtacctaatgtaaaatcaatatttcagcaattcggtaaatagtaaaatagagttttagcacttggtgctaaaactctattttttatgcgatatacagcttgaaaagctaatttttactagggctgaggtgtacaattaatgtatttaacattagtggtatttgagcttgcccatggtgtattgccactgttaacaaatttaactcctgtaaaagtactatcttgaagataatttatagatgctccctttttacaataatttaatgtaatattgtttaaacttaagtttgcattatattgtgatggaagagcattaacccatattccgtagcctccagcttttttacacattatattagataaagttacatcatgaaaatatccaggtactggtgcaggattatcaacatctgtaagaccgtaattgctatcaaaagatattgcatcatttacaatgttctccatagtaacatctcttactgttatatttctagctcctccgcctatctctttacttgttttaaacctaagtcctatattagttccattgaaatcgcagtcttcaactgaaacattttgaatccaggctccagtataactaccaaaaactactcctccgtgtccacgtccagtattagaattaaatattcttatattattatcaggaatattctcttttactgcatcagccccatatccagcattaaggtttatacagtcgtctccgttatcaaaatagctattgaatatgtttgctacactagtattagctatatctataccatctgcgttgtgtataccataggttttaactgaaatcccatctactgttacatttttactatagcttataaatatagagtgctctgatggatttactatattaactccaccaagataaagacctgttaccccttttgctgttattaaatcgcctcttgccttatctccctttaagtttgtttgagcttgtcctagcttagtgagttttccacttgtataggttcctccgctcactgtgccatttccgtatattttaacgttagaaatacttccatagttagttgtataggcatttattaaacccatatagttgctcgtagtataatatggaaacctcttacttgtaaatgcataatcattaacattatcgctgccaagaagtgttccatctattctaagtgacatattactctttaaataaattgctcctgataggaaagttccctgtggaattacaacagtgcctccgtctgtacaagcatttattgcagcttgaatcttatcagtatttaaagtttttccatctcccactgctccatatttggttacatcaaaaatttgagaggttggtgtagtgctttgtgttattactgaactatcttcagactctgtactatctgaatacttagctctaaccttaaatgaatacgctgtattaggctttaaatttgtaaccgtataatttagcttctttgtattagcagctaaagaattatttacgtacacatcataacttacaaccttcgagtagtcagttggtttgtcccatattaacgtaatagaactatctgaataacctaaatcaggaacgataacattttgaggtacattactagtatcagcagctctaacaattttcccgttaacgttaacaaataaaacgttaaataacaacgcagtggcagctaatattgcttgtaatttatatttccctaacattctaaattcctcctttaatttggtactgtaactacattttactaactattaatttctcattcaagttctttaaaaatgacatagttttattactataagaatacctttacttaactatgccatacgtattctttctattctgttaatcctttttccttacttttttctaggatttttaggaaaccatcccttttgtactctcttctcctgctcaaatatctctttaatactccatatacaagtagccccaattatgcccattattgcagctgctacagtttgcttttgaaatagagatattattataaaaataatccctaaaatcaaaaacaatggccatatattttttgttagataatactccaatttaattacaataggatgaaatattcctataataaaaaatgaaattgccgcaattataatcccctcaaaattcataaaaactccccctctataaatttcgccaaatatttttctttaatctacctacagaaaactctcctccatgagccggatatacctttttaactcccacttttatcattttgtcccaactttcatagtactgtttcttatccatgataaaaataacacaattcttagtaccacagagtttaagcatattggcagctgcatcccctacaaaacaatctccatcttcaaataatatagaaattgaatcaatagtatgtcctggagtttcaataatctttccaggcaaatctatgccaagctcccttaaagtaacctctcctgtaaaaataatatcgttatttctactttcatatggtggaaacttaagattattttctttctttactcccaaaacctttgaaacatacatattcttatatctaattaaaaactctattcttttatttataagtcctcctccgtgtgtttgatcattttcccctactttaataagttcgtttgttttatccgacataacaaccctaatatctttattctcacttaccaatttatttaaaaatcctacgtgatcatcatgatgatgcgttaatattacatatgaaatttcattaattttaataccattttcctttagtcttttgagaaaaagcttccaatcctctttgtatcctgtatcaatcaaaacatatctattttcatttatcctcaaaaggtagtcattggttacacttaactttaacttagttgttatcatataatcatcctcccatttaaaatacgagctcatattcatattttaagtatactcttctctttccattcagtcaatataatatgaatacaagctcacattatattgactatgatataccttaatgataaaatattcgcatagaaacctaacaattggaggataatttaaattgagaaatcctaaacaaacacgtggaaaacagactaaaagtaaaataataaacgcagcttttgaacttttttcagagaaaggttacactggcacaagttctaatgaaattgcttcaagagctgaggttgcaataggaagcttttattcttactttaaggataaaaaacaactttttatagaggttttaaaagattactatgataacatatcaaaaatatcattttcaaatataaacggcactatctctaacctcgatgattttttgtatgaatccataaaaattgcgcttaaggctcatgaataccatcctgaatttcatagggaagtcaacataatggagttagctgatgatgatataaagaaattaattgtgggttatgagaaggtaaagtttgattcttttaagaaactagttgaaccttacaaaaatgaatttaaaaatcttaattttaatgaagctctatttcttatatatactacaattgaaaatacagttcacgtaattacattctcaacagacactaatttgaacaaagaaactctaattaaagaactgatatcaatgataaaaagctatattaatgcataaaaaaatgcagcactagatataggaaaatcatgtgtaagattactcttaccttgatttcttctctattcttgatgctgctgaatttatgagacggaagctaccaagatatgtcttcataaattcatcaaaggagaaacaacaataactttacacttataaatcaacaaaattaactaggctcatttcacttattattatatagcctaaatgttacatccgttttaacaaaatgatgcttaaggttaattccatgttaatatatgtttacttttagcatttatctaaactttaaatttttctataagaagctctaattcatcggcttttttgttaagtacactagctaaggaagacacttgttccattgctgcaagctcttcttgtgaagctgttgctacttcttgtgcactagttgaaaaatctccagctattcgtcttacttccttaactgtagtggttactttctcagaatgactaaatatagtttctgatactcctgtcacaccttttatttgatctgttatacttcttatagcttctagtatctttttaaaatcttctcctgcctcacctactacctttaagccttcattaacattctttgtaacaacatccatcttacttattgaatcagcactttcctgttgtatcaaatgtattatttctgaaattttatttgccgaagaagacgactgttcagctaactttcttacttcatcagcaacaacagaaaaacccttacctgcttcccctgcccttgctgcttctattgatgcgtttagcgctaataaattagtttcatttgctatatctgtaattgtatcgataatttgtcctatattttttgatttctctcctaaactataaatagtagaattagattccttaacagaattatttatattattcatcatgctaactgtttcaagcacagattcattaccctttatagcaaactcgttcatttcatttgaagcaaatagaactttatttgattgttctgcaatatactctatatcctttgacatcttctcaattgcttcaaaggcatcttttgaaatttgcagctgtgaatctgctccttctgcaacattttgaattgaatttgcaacatcatttgcagcattagctgtttcttctgtggtcttagctaaagtttgtgttgaattaataacctcactagaaacatctttacttgccataatcatagaagaaaaagactttagcatattatttaatgcgtttactataagacctgtttcatccttagtatcatgtactataccttcatctaactttccttctgcaattctgcttgtaccttcttcgattaattttattgttccttttataccttgatagaaggatataaatagataaattaacacaagcattgttaaaaccgaaatcaataatacaaaagttcgtacatttctagcaaaactattatctaactttaatgcattcattagctcagaagattcatttcctattaatgagtatatatcttctacagtcttagtagccgtattgtaatattcttctgaatctatagttatttcacttttatttaataattcattatttattatattaattaaactttttgaactaccaaatacctttgttgtctctgaactcaacttttcctttaattcaggcatggttttatatactatatccatacctcttatggaagaattcaaattatttgttgcagcttgagataaatatagaagtttagatttttcttcacttgttattgattttttagctgctgcacctgctcccacacctcttgctaatcccatgttttcagctaccatcggtagtctatttactatcgtatctaccaaataaaatctatctatctttttctctagtactaaatttgacctatctgaaatatcataattaagctgcattattttgtttattaaaacaatatgcttgtcaataacctctttgcctttgtatttcgtatcttctattttcagtaaagaccaatcattttttatgttgttccattcatcattaacatcaattttagttttatattcttcatttaatttatttatagctgttatgtcactttttacctctgcctcttttgcaattatcttatccttaactgttacgtttccatttatgaacatcagagttaagcctctgtgctgctgtacatgctttaataaaagggttgtttcattaatatagtttagtcctttaatttgcttatcacttactgtaacatcattattaagctgattaataagaaaagtgagtattgcaacaagtggtaccaaaaataccatgaaaatcaacaaaaattttttagaatactttaacttattcataagcctaattccggggtaaaaaatcctcttcatgtatttttcctcctaatttttaattgcccataggagatttatcgtcttttatataaaataactaatacattttaattacttggcttaacttaacaaaatttttgtcgttatttgtcaacgttttcacccctcttattactcatgtccctaattttattcttcatagcttaattgccactctattccaaacttatctactacatatccataacacttgctccaaaaagtttcttgaagctccatcaatacagtgcctttttcctttaacctattaaaaatcaacttaagttcatcaatatcattgattataactacaaggcttatattatttccaacaactaacttcatacctggaacaatatcagaaaacattatagtgcttccttttacttcaagcgcagcattaagtactaaattttttgtttcttcattaaatttagccccttctttaggaggcatatcaccatataccataattttaggtttctttgtttcaaaaacttcagcataaaattcaacagcttcacgacagtttccatcgaaatttatatacgcttgtattgccattatttctcccttcctcttaacttattttcctcaacatattttttaaaattatctaaaatcgcttgccaacctttttgctgcaggtcaataggattacttttttctgcttcaaagctttcaactatataggttttatctttctctggcttaaaagtaatttcaacactcctatcatcatccattatgtaggaaataaactcatataaccttactttattatatgttccgccaaaatcaaacccaaagctgccatcctttgcttccattttagaaacaaaccttcctcccactcttaaatcatttttagcttctgtagtgtgccaatcatcggaggcatgattccaactctttatatgttctggttctgtccaagcctcccacaccatatctataggagcattaacagtggtttctatagttatttttatactattatctactgctatattaatcatctcctctgcttttatattctttatgtagttcttttgttaatatatcctctatttaattgaattatccttatgaattttattaattaaaataaaaagtgctcataacgctttaacttatcgttatgaacacttttgttttaagtcctcttattttacttctggcttattctattgcaatataactatgtagaaaaaaaggctattttgtgttataattcatacacaagtttttcactatattttaccaaccaaggaggcttttaatgaattcaaaacatataaaatcattcttaataggtttcttagtctttttaagtggtgcaattatttctgctaatctaggtgaatttttcgatggagattctgttgaaaatgcacgttcatacataataacattttcagtattgtttctagctagtgtggtagccgtatcaacatttctaatattagaggaaatgagaaagaataaataattcctctatattattttctaattgccaatattacaactaagtattcaatttatattaagattaattgtcactgtaaaacattctgaaactgatgcattcctattaacatacttaaacgtaatagcttgaaaccccttttttaatgtcgtaaaataaaaatttcttctagtataatctattccaactaaatcattagaatttttaaatggaatattcattcttttattctttaaaagctcaacgtttgaattatccatactattttgtaatctccacttagcacaaataatactactttcatgtaatgatataacaaacattttatttgtatcaacatttatatttacaaaactattattagttactgtatactttttaattttttcttttccaagatatacatatagtattttcttatttatatcctgtgaaatatcaaatttttgtttgcttaaaaattggtctattgaattatttttaaaagtattattagatttttgtttattatttggatttaatatatttgcttttttactataattacatccagagaaaatcactatgaaaataataattaaagacatcagtgcttttttattatacatttttcatacctcatcactaaatatttcattatcctagattatttttaatattccctgatgctgttaaaatgctataacttttttatataatatttgatagaatttatttgtgagtgtcaaggaataactatagtaacccaattaattctcaataccgttttagagggttaggaaggacactcacaacgtaatttattatattactgtaattattgtaagtaaatacaaatgaagtataaagtcattcatgaatattttcgcagtaaagcttatagcttaccaaaagtcaaactctttgtaaataggtaaactatgcctgcttaatggtaaacgtaaaaagtaccgatatatgtaatcagtactttcatttaaattaactaccaactccaaccaggataactggctaataccgaaatgtgattaacagataaataacctataataataaaggaacaaagtaccaaaaacaataatttttttaccctcgagttcatattacccaaccttcctttccttacaatactcacaaagttcattaatcgatgcgacatcacccaacctagtataatattgtattatattgaataccaaactatgattaagactatcataggatctacccatattttcagttaatataataaattcatccttaagttttagtttgttactattcccttttatcttggaaagttcattgagtatatctttcgttacactatagtatttgaaatcctttgatagctttaaagctattgtcaaatacttaatgcttttatcattatcagccatcataagataacttttacctaattcagcatatatttgtggtaaagcttcaaaatcatcagaaatattatgaagattatttataactgtatttatacaatttacagccatatctcttttacccatacgtaaataaacctgcgtcatgttattatagtaaacacataaattattaaaatcatcttttaaagtaatacttatcaacttattgtaaatacttaaagattcagcataacgctctgccccataataacaatccgcttttaataacaatactttataatatctgtcttcatatgtagcttttattacagattcaaaaccagtaattgcatttaacgccttcccatattccccaagatagttataatatagactcatgttgaaggtaaatatacatttatatttatcctccatttcagtaaatcttccaagtgcgtatttgcaaacacgtattccctcagcaaaattacccgtatgacaatatactgcggaaagcttacggaatatagaaattactcttctcatatcagtttgacatccaattaaatattttacattttcataatatatatacgccttgaggtgattatttacatttgtgtagtaatcccctgcaatctcgcatatttgaatctttaaatctggcaattcccatttacgataataaattctctattttttcaagcaaaacattaaaacgattatccttgtacacactgatttccttaaggtcctgtatgtatgaggcgatcacctttttagcttgggattcttctgtttccaaaaggtactctacatttataccctcatctagagtttcacctcttttttctaatatatcttttgtatttctaataataagttctgctgtacttcttgttaagttggcttttccatgttctatctgactaattaaattacgtgtgagttctgtacctacaatatcatcttgatttaatttatattcacttcttaatttctttattttttctccaattgttaaaatgctagtcatatagttttatcacttcctcaatatggtaacaaaatttttttactacagtatagcatttcttcaataatatgtaaagtcatgctgctactgtgcctatttgcatttaatgagattatgtagaaattattcttataagagagataaaaaatataaggatgggagtcattttcccatcctttgtttatttttcttcaaactttggcttatgtcgtatccaagtcttacctaaggcaccaacaaggagtcctatcacgaagataacaacccatcgccaatcaaagtccttagtaatattagctaattttggggtaatatcttttgtggacaatggcttagcaaagaaattaaagatattatccgcctttacaccatctgtccttgtgttagataaagtagctgcaaagtttttatagtagttttgactatttttgaagtcatcgttccctgtacttaacagattattcgtattatcaatgaccttctttgcatcattctgtgtcttggtgaccgtatccaccatttgatcgaactcagctgcattactcttgatgatttgtgcacttgccgccgtatcttcagcttgtttcgcagttgaattcaccatgtcagaaatagtgctataaagtgaatccccaccttctttatcataacaaagaacaagatcgttttggttatattccttccaaggtttttcttgaagtaatattgtattatttgttgtccacgctttgtattctgcattcagcgtatccattgtttgattataccaagcctgcaaatcacttgacacttgactaaagtaattacttggcaaattatcgctcaaggttgctttctctttttgaatacttgcaatatttgaattcaacgttgtcagagtatccgtaacatttttaatgttggcttttccataattcatgaattgcttcacatcatcatcgctcaatcgactcataatttgagtgacgtccatattaccatacatcttgaaaatagattgttgacttgcttcttgaaagtcagaaaccttagtacagctttttatatcagaataagttgcccctggtgctccataaaggaaagtaatcagactacttgcagtatcaatattattgagtaaggtcgagatatagccaaactgactgcctcctgcatattcagaaattgcatttgcaggaataagaccaaaattttcaacagacgaatctgtaccacctgaaccattatcaacgctcgctgttaccgttccacttgctgcttgtcctaaatccactttatatgtaacaacgtaagtcatcggactagttgtcggtgcagtcgtgacattacctttactgtcggttatacttgttgttcgattatccaaagtcacagaattatctgggttaactattgcacctgtccccgtaggttttccaactatagaaatccctgagttagaaagtccatttgaagcctgaagttttaaagtatattcagtagctttgggtacggtaattgtaatttgttttgtaaaattctcattactattatttaccgttggagcagcactaaaatctgcagtagctgttttgattccaaatgctgtagcataattttttagaacccccaacttagcttcataggtatccttttgttgtggcgtcaaagaaccattcttcactagtgtagctaagagagtatcatagtcccccacatttactgacaaattactcaagagattgtttatcgttttaggataagctgttcccgagatattatctcttttgccaaaggaagttgcaatcattttagccattgcacttcttgcattatctgctgtttcaagactagtaaaatcagttttatctggtgttggactaatatcttgtccgtagaatcgtaaatacatatctttttcaagatttaatagtgttgtttgtttgcctgtcaaactatcaatctgtgtaccaatgttgtcatgtaccccactaatcaaagtgttataactcgaaatttgattttttaattttgcatagacacctgtttcattgccagaagcatccgtattatgaaactgctgcacggcttgcaccgccttattatatgctgctgtgtactggtcataatagtagcttttatccgagtttgcttgattagtaataccctgattggcatttgtaaggttaatatcagtgatcttcctttgggtatcaaaataattggttagatttggtagcattccgttgaatgaagaactactttcgttcaacagattaacgactgaattggtaaagctgttttgttcttgaatccaactatcattttcagatttcaaaccatttgcaatggaaacaactgaactataagactcgttggttgtctgaaaaggtccatacacattatcattaagtgatgagaggagcgtgccttgactcttaacaacattgcccatattcgtttgtgcatttgcgacatttcctgccacagaagcataatacatcttgacaatggaagtattgaaatcataaagcacattcacgatcttatcttgcaagagtttattgttcagctgtgacttagatgcaagtactttataatctagctccgctttttgaggatttaatgcctgaagtgttaaaatattgtgcgtgaaattttgtggaagataaataacagcatcaacagaaccatcagcataggctttgtttgctaccgagcgtgacaggacttgccaattatacttattgtcattcgacacaaggttcacgaaggtttcaccaaagttataatttgtgccattaaacgtttggggctgatcttcattaactagagcaataatcggctttgtagtttgtactgtttgtacttgtttatgaagattcctattcagcaaaaacgtaagaccagccacacaaacaagcagaaaaaggataacacctgattcaatcagacgagactttttcattttcttatcaaatttttccgaaaaactcttagaatttgtcatctttgttttatttcgcatttctattctcctttaatgtctgttatacactggtttttcaaaaagtttcactagttacaatattatagcttaaaatttttctattatcaatgttgccaaatattcctataacaagtagttcttttattatatagcaaaactcctcctaagctatcatttttctgcaaatatttatagatatttttcaatatctccgatttcttcttcttggttaacttctcatggttaaaaggatgcttttaaatagtaatcaatacttctctccagttgttttttttatagctggaatatttaattttttgtttacagtcttgtttatgagagctgtaattcgctttgcatggttcagcttattttaattatagaaaagtccatgctatgatgtgtaaaagtatttaaccattaaaaatcagtaaagatacagtcatataactgtatctttactattgtaaccaactattaattactatacattatcttgcagttaattcatgaaatccttaatagaatagtttgggtttctattttgaaaagaggtatgtatagaagttagcggaattataatgaagggttattagaccctcttttttgattataaagttgtctattttaacttagaactatcagcattaatagttgaagtagatttatctgacactctgactttattaggttttaccatatcaacaaagtaaccaagggctgctaagattactaatataaccggaaccgattgtcctaacgtgtaagcatttgtaaggagtccaacaatcaccatacttaataatgctagcactgtcaatatcttatgtcttacaaaaaaattcctatgatctttaccgcaattagaacatatgcttctctttgctatttctttaccacatgctttacactttatcaatttactcatttaaatcttcctttgtcttacttttttgtatcttaatttttttccattatattataacaacacaagcattctttatcaataatgcttaaagtacacttatagctaaaaaccaatggagtatgaggaaaatatttattttatttttctcctctcataccatcaaacccacagcagattttcactgccaagtttcctcccatgctgggcgcactaaaaataatagcctcactttaacttgagactattatcaaacaaaatatattttctctagattgaaaatttgtcatattaatttgttcttttaatataccaatataaccttacaatcgtttatactacattaattttacacatagctttgcattaaatataatgtttttactctttaaatttgccccaaactattgttcctttttcattaataatgttatcaaaggcttcccaaacactatctcctacccacgctgttgaatcaaatatccttcctgactctgatatatatagatatatattaaaatcataaagcgaacctataagcataactttttcatccacataatcctccagcccaaagttaaagctatttccaagtcctaccgtttctttaatgcaagtagtatgtttagatgtttttgtagacccgtcttttctcttcttctcaacatttatttttaattctccaaactcttccataaatcttttagcactttctaaaacttcaaatcctctttcttcaagaaattttacattttctgatatatctatttttcttccctcataccatcctgacttctttaatacttctattgttttatttgatatttccattttaataccccctaattatcaatgttataagttcctttaaatgtcctttggcaattgtcacatggttctgcgaatccaccatataaattttcagtacgataaaccaaatcatcatatcttgcaccttttaatattgcatctcttgaactccaaatttctgcacaattgtcaacattccatcgatattcaaagcttggttcaccatactgattaaattcaccttcatctgctgctgccttttttactctttcaatatcagctcttaatttagccatatcttctttaacaaactctttattttttccaacccaaaagctatcaggtaaactttctaaatgctcatcagataataaacttctataatatttagtgtaatcctcaggtgttttacaaaactttctaggatcaactcctgtataatcttttattgttgggttatatttccaaataccacttccggcttcaccttttaagtttaaatctcctaaatccgcagttgaacaaattttacttattccatttgcaacactactatcaataacttttctggtaaaatatcctgagcttctgacaccatctgggatagagcctgttttattatcttttagtggtagatttgactattttcaacgtctattattattttattattctaaaaaagtaccaatctatttagattagtacttataatttaaataagtatcttttaattttacaatcaatacttacttattacctattaattcttaattattaaataaatccatcccattgcatccaatttgtcacaatatcatagttaagaattctatcccaaaattcttccgcattattaccaaaaaatccatgttcggtaaacatttttcctgattcagaaatcattaaatattggttcccatttaatgatccaacaacaactaatttttcttcaacatattcttcttcatactcgctaatacaatctcttgataacataccattcaaactttttatcatattagtagtatataaatcatatctattgaaatgatattttttaatatcttcctctggtattctaggattgattggacagtacacatctatcattccaaattcctccaaaaacttttttgcttctggaaatatttcaaatcctcttttttcataatatacaactaaatctgttatatcaatctttctatttggatgccacccggattttttcaatatctcaatagttttttctttcattaaatatcacctacctaatcactaatacatcttcctgaatgtaaaaattctttaaatgtttgctggcaatttaaacaaattttcaactttcctccacgtaagtttttccaaaagcttttgcgaatgcagctgaagcagtcccaaagtcacttactgttccttttattttagtcaatacactcttagcattttttgcacttgaaacaactccagttgtttgtcctataacaattatatccatttattaattgattatttataattatatcagttatatgttcccaatttcattaacttttaagtagaattatcgaacccagatcttcctagcttatcaggctacgcatatcttctatgttcgttttactgaatcctaaagatgtctgttataattaaccagggagtcctttatcatatgcttatacttgtacaactgttaaaaagattttaattgtttatcaatacctattaaatcagtatctttaggctttattcgacactttttaagtttaaatgccactctcattcacagttctttaaatctctgttttcttaggtattattgttgctttttaatgtagttcttttaaaaaatgtatttatagcgtatgttaatactaaaaaataatgaatcagcctacttaaattcagctgattcatttcatttatcactgcattattaatataatgtagtaagttaacctataatgtttattaactttactacaaatttatattagtctttcttatgtagtgagtttctgcatttttatgaattatatttctccagtattttaatatcaatctcatctaaaatagcctctgacttatcaaaaacagtcattaggactcaacctaatgactgttctatttattataatttagaaatattcttcatttttatatttggaacagcgctgaaacttttttcctgccttataatctatccagtttaaaaaaccacttttatattcacctaacagtccattccaaaagttgtcactatcttctgcccacattccctcactaacaaagaatttgccagattcagaaatacatacaatatattcaccttgatataatttacatacaggaattgttcgttctccaactttttcatcataatttgcattatgttcataataatatttcatatcttcataacatgttgaatgttcatcataatcttcgtctccaaaagaatctatatatttagctataatatggacttcaccaaactcttccataaattttcttgcagcctcaaatacttcatacccttcactttcaagcattttaacctgatttgttatatctatcttttggttttcaatccaccctgatcttttcaatatcttttttactctttcttctaacatattatttcacctttcctacattatttaaatttctaaatgttcttttacaattttcgcatggtttagcataattccctgaaccagtttctacacatttgaaacttatatcatcaaatttagcaccatttagtattgcttttctagtactccatacttctgcacaattctctacattccaatctttaaaagaaggttctccagttaatttgctaaatttaccagctattctagcctcattcttagtattttcaatagcatctgtcaatttcttcatttcagaaataacatcatcttttacaagacctttacttgtgaaatattcatctggcaatgtttttatataatcttctgttaatgtatgctcataatatttcgaataagcaactgattcatctccatactctttaagtattttattatacatatttttatcaaatttttcaccatcagttaatatagttggattatactgatgactatttgatgttgccatagatactgtgtccaaattttcaccatatgcaacagcagtttttccataaacatcaccatttatattttttctaaaactatctagtttttcagatacagaatttattaatgatttttcatcagtacataaataaacattatcttccccatatttttctttcaaataattataccactcttccgtagagtaattaccctctccactaggattacccatcaccttatcttcgctcttaacggccttcacaaagttatccttaatatctccaactccatttttaaaattcttcactacttcactaaactctatattaggtcctacactaactcgacctacaccgggcatttcaacttctacttgacgagttaatccttttaaatcttttcctgtattttttaataccttgccaaaatcttttattgcttctcctgacgctggtaacagctttccatttacaaatcctgctgcttttttaacatcatcaagcgttcttcctgttaaattaattatattctctgcattttttgcacttgaaacaacaacggattttgttaaatcacctatagcgcccttaccttcactaaatactgtacgcaaatctgcaactttactaccaatgttatcaacggttctccatggcaaagtagctatattcttagcattttctacacttgaaacagcgatggatttcgagaacgtacctactttaccaagcaaactttccgccttgcttgccttaccagccgcagcacctatatctccttgatttactactataaaaagcaatgaactagcctactcaattttcagctagttcatttgatcttctcactgcattattacaattagaaatcctttttattcatttgaagtatatggagcaatatcagcacttttatattcttgcataataaattttccttcttcgtcaactgtatttacctcagtacaaatattaattaagattccatcatttacggtaaagtgaacataacatcataaggatctttattttcaaagaattcataatataaatttcttatctcttttgaatttatatctacatttttacataacagctcacctaagtgttctaaaattcttccctctttttcagtaaatactttttcctcaattagatagttagcaccacctggtgtattccatccccaatcgtcaattgcgttaataagatctgaatactgagtcgacacacaatatatactttcatattttgaacacaaaggatgaactattagtataaatgtcgataaaatatttaaacgatcatatatcctatgtgcagttttaacatcttcacatatttcactaaattcttgtagtatcttttcatcatcataatctatcaaaaatataagtatttttattgcaatttttttatctaattttttcaataattgatggattattttatttttttctatgcctaaggcaataaaacacttaaggcaatcctgtgcatcctgaatattaatactaatttcatcttcagcaagtgcatctatatatttatcaagtaatttttcattatcatcaaataataatacttcttccccttcatcatatttacaatataaataatttactataatttcaataagtattcttttagttaaactatcctttaccataggcaatagattaactaacttactaattgattccccctctatacactcgaaacgactatattctcttactgattttaatgaatcataaatacaccactcttcttcagaataattattaactgtataatttattataacttctattatattcacttaattcttcactccttattaatgttgctgaattattttccactctatgacattttcatcttccttataaagtaatctcattatgtttgatgaattgttagtagctgaaaggtctagtgaagtccatcctgcaaaattatctcctccagtagttcttttatcaaataatggatgttctctatattttgataatctattagctgcagcactatccccatttcttctagcaataagatcatttaaatgctgattagctaatcgcttctcttctttcgttaatcgatgtccaggtctattagtatgtgcccctttgcttctaggaattttttcgtttaaagcacttctaggatgaggtattgggtcatgttctattcccaataacttttctggtggaatagtctcaacttctgtctccacctcagacatcttacctttaatccattgtgcatacctatcttgacatattttgtctgcatctacatgttctatattttgcttacttattttgctgaaaattgagccatcatcgcctgcaacctgaaatgcatatctgataccattaccttgactaagtgctgtactcaaatctgcaaacttactcctaagattaccaagtgttcttcctgttaaattaattatattctccgcattttttgcacttgaaacaacgactgaatttgttaaatcacctatagcgcccttaccttcactaaatactgtacgcaaatctgcaactttactaccaaggttatcaacggttctccatggtgaagtagctatattcttagcattttctacacttgaaacagcgatggatttcgagaacgtacctactttaccaagcaaactttccgccttgcttgccttaccagccgcagctcctatatctcctggattaacaacgaaacttaaaaccgtcccagttgtttgtcctatagtataagcatttccactactaagtttgttccaatagtttccaactcctgctttgaattgtgcttgtgcttcaggattagtccataaagtatgaactgtgtcacctatgtcatatacgtcgagctgatactttgctccaacaaattgaatagcagcatcgccacaaccagctgcaaactgcaaagcaggatttcccgtttttactaaaggctccccaatattcttgttataccattgctcagctccatttgtcaagcttcccaatatgttaaaactattaccagttgttgctattgaagcatgattgatagcaccattaacacctccaacaataagcataacaccaaattccgatccaactcctgtggcgacaaggactactcctgcacaaacttccagtgcatcccaaataagtcctttcttggctttctcctttgccgcctcttccattcgatcctggtcaactttatagttcttaccaattctatcccaattagccttaaagtctttctgattatcttgtacatacttggcattaaccttaaaagcattcacaaaatccttacttataagcttgctaaagcttcccggactataagaatatccacgtggaaccgaaagcgtactcttcaagagagatgttgtctgtgcaattaaatcttgaacattatcaaagtctttatatgaactttcgtatttattccatttatcattgagatcgctcaccgttttttccatgtctttcatacctttagcaacattgaagagacgtttgctgcctgctcctcttagggatataatatcctctgcttcatctgaaatagcttttaacttattgccaatagaagtaaaatcagattggtgtgagcttagattattctcatgggcatcaaaatcctctttaatgagcttgaaactctcgtcactatccacttctaaataacctttaacatactttccaagtgccatttcataattgttaaggagaagctcaagggtttgaatcaaggtcatatgtacttcgttaatataagctttcattgcattagctgcgttgccttttatggcattagtttggcttaattgagtcattgcctgactcaattcatcaaggggctctgtcctatttttaattcctagtgcaattcgaacagaaaggtcggtcagttcctcataatatagttcactattactcatcgttttgccccctgattatcagtattttcaatattgacacccaattggcgaaactcctttaagtcatgtgctgccatttctccataagaactcaccaattttgtgagatcatcgtaaattttgaaaatggtatgtattttatcaactttaaggtgatcatatttgttgtctaaaccatttctaactcctgctaccttcgatgcaatttttccaaccttcataacttgagttttatgtttgttagtattaactgatacctcgtttcccatatctttccccctcctaaaaagctgtaatggcaagggcttttgtcttcatccatttatcatcaatggaccaagctaaactgtacatcttactcttacatgttgaaatcgcttcttcaacttctggtgctgtccttgctaattcgtcactagcttttttatattcatcgtcaaactgacttttttttacttttcccgaccaattcgttgttccagctgttttgaattgcgtaaaatccaagccataagtatcatctaacaaattcgaaagtcgattaacataaccctttaggcgtatgactttattatatttttctgaatcactcatcgtcatcctccatatctctcacagctgcaaaaggatcatcgtcaaagtttccttcctctgctgcggctgtttctggtgctgaaacattttctttaatttctacgctagacgctaagtactcttctttagcttgacatagttgctcaaccatcaaggcatcatcatcatctgtatatgcttctgaaaccaccttcaagatgtctttgccattaaagtaagctacattttcatcaatcatcccttcaggataaagtattgcaccataatcaaaataattgttattgactacatttgctctgctgacaatcatcaattttttgattgcacctttaagaattacaatacttccaagtggtaaaaaacttttttcttccatcattttttaacttcctttcctttatgtttgagtttataaaatggatcataaggattttcaggctccttttttactggagtacttttaggaaccttctttacttccgcttcagcctttggcatagcagtttccacgattttgacaggctcttttacaggctctttttttttagaggctgtcggagcgtcaagggctttttttagctgttcatctataaacttttcatctagcttgtcctcataacctcgttgaaccacttccgtaatggatttgcttgaaatcacaagtgtcttatatttgctattttctccaaaagggtgaggaacaccgcgatagcccgcaatggtctcctctccccttttttgaaagcctcttgaaatgataatatagatactatcatcgtcttttattcttactgccgtccctaggggtaataatactggtgaacttttagtcattattttctcctttcgtaagctccggcaatttcatcttatcaaaactagagccacctcttaacacaaagtaagcatcttgaattgaaagctcaggttctctagaactgcttgtacctttgattagaggagtatcataagctcttgaaccaatcattcctgtaaatttcaattgtctaatagcttttggtacttcgtcaaaactcttcgctatatattcatgcggagcaaaaatcaacacatctaagcctgctttgtaaacatttttcaaggctaaaacaaaatcactggcaggaaggtttgtcttttgaataaaatcttgaagattgctaatcacaagaagcatcggctcgccattttcatgcttttttgcaagcttcacataaccaaccatacctgcaatgacatctttagcatcatttttatctgtaatgagtgtgacattttccgttaaagagtgatgagcaagtacttcctcaaaactttcattaaaatcaaccaacaagacacctgtcttgattttagcaatttgtttcaataaaagggcttggaaaagtaacatctgatcatcatccattggtgcaaacaagaaatacggctgagcacttggtacaattccaagaatttctgttgtttgataagacattcccattggtatcttttgttctctttgccactgcataacctctgaatattcctcaaaaatctccaagcttaattcttcaggtgtcattggaatctttttagggcgttttccggtccacgctttatccattttaatcacatcattttcaatagcttcaagaagtttaacatcattcccatcgtgagttggcaaataaaattgaattgctgttggaatatccagcatcacttgcccacgtccaacaatttcttcttgagtcactctctctcgtcccatcactgcaaccacttcagactcatcatttagataaagcaccatcttagttttgatatttgacatcatgctcatgcgcactgcgcctactcgtcctacggtcatgataaggtatagtcctagggctgccccttcacgcaatagttgaatgagtaaattatcaatatcttctttcctacggtcttgttgccctaagccatcataactgtctaatatagtgataatgataggaagcttttcttttgtttttgcctcatactgagaaagggatgcaactcctactttcttaaacaagctctttcgatagaataatatagaagaaattcgttccatcattttttgaagcttttctacctcttccaacatcacgatatctgctacatgcggcaattccttgagtggcaataagccattattcccaaaatcaataagattgaactgaatctgctcaggtgtattttgccttgccaaattcatgacaattgtttgaagtacagttgatttaccatagcccggacttgaaaagatagccgtatgactagaatccgtaatatcaaaagtatagttctcttgagtctgcttgcttggaatatcaaggagacccaatggaatttttgtattgagttctgctgtttgagttacctctggtgttggaatcttactttccaaattaggtaaccaaggtttagccggaagtgttaagtttgatgcctcaaacacacgattgacttccgaaataacagcttcaagttgtgtaggtaagtcacttgtgtcatgtccttgaaccacttcctcgcctggatcgtaaaccagttccgtttgaccaataccgttaatttgataaatacgctcatcgacagtttctaccgtagtgtcatctggatcataaggaactcctgcataaccactttgaaaaagctcatagacctcgttttcaccaacctttatatatccacgtcccggctgcgttatatgtgctgcatcatgtgtttttaaaagttcattagaatcttgctcacttgccatcttaagagcaattttactcgttgagttggcttctatttggtcattgacaacgccacttggcttttgagttgctaaaatcaaatgtactccaagagaacgtccgatacgtgccacagaagtcaactcatctaagaactcgggaacatttgattttaactccgcaaattcatcagagaccaaaatcaaatgtggaatcggtttttcaggatatttcgtatcaggtttaggatttaagcggctcttataaagactcatatagccgtttatgttattcactccgaacttagcgaattctttcatacgcttatccatttcagccttgatacttgctaatgctctggcagttcctgctccatccaagtttgtaatagatcccatgaaatgtgggagtttatccaaggtattagcgatacctccacccttccagtcaatgatgagcattccaatatcttctggagagaagttaatagcaagtccgattaggtaagttgttaagaattcagacttaccagaacctgtagtaccacccaccaaagcatgtggtccatgaaccctctcatgcaaatcccaatacatatattccgattttccacgccaaccaataagagatttaattgacttattaggctcagcgcttgcccagcgctcctggatatccaattcctcaacctttttaacttcgtattggtcaagcaaacttaaactttcgggaatcgcatttttctctacttcaacgtgctctaaattagtgagcttacgaaggctcttttcaagtaatggtacatctccgtatggttcgaaagatttggccacatagattttattatcattaatgatttcgcctgcactttggtttttgtattctacaagtgcagtaactgtttcagtaagaagtttttgatcttccttacaccagataactgtcactccaagctcactcatatcctctgccaaaaattcgttaataccatgacctgataggtaagagtcgtcaaaaatcgtaaaaatataatgtggtacaaattttggtttttctttccctgcgtcttttagtacttgtttacgcttgttcaaaatctgatagaaagaatttaagagaagatcacgtgtatgggcattatgaacaataccacgcatattcaattcttgaattttgaaatgagggagaagtcgccattgtatccaatcttttcgataacttttctctggcacaagactcaagaaattgacatctctataagaatggaagaaagccacttgtagtaataaattagcaactgcggtttttagtacaggataggttccaaccaatcccaaagtttgcgtgctcaaattaagagttattggtacttctcgttgcgtcgaaaagtgttcaacaaggtgcttaacacgcagtgacttctcatcattatctcgatcattaatatccgaatcaacagataaattagatgcttgatttccagtgccgagcgtaaccactaagaaatctttgtcacttgccatcctctcataaattcgagaattgtaagtttcaatcatttcagctaacttttcaggtgagggatttctaaaatgcaatacttctgtttcttcatcatatttatcagaaatttcagctaccgccttgataaggtattgctcgtagtcttcctttcgcttttgatcctcaatcttatgctccttcttctcacttatatactgagaaactgtgaaagtagccgttataacactcatggagcccattcctaacatcatgataggattacgtccagaaagaacacttgtaacccccgtcgcagcaagcataccaagcggcggaacaattgctcttaaaattccatttttacttggcttttgagcttctccgattttctgaatcttaaatttatcagaaggaggctctaaacgaagccgcggactacgtctgtatttaggaaaatcctttggaaattcaaccgcgggaagctgtcttaaaaagctctcctggttaaaaacaacagtttctgaaaatgtagttaatttccattgttctttacgcttttcaagcaaaaaatcatgggttaatatttgatcccctatttgaactcctttaacataatgatgccccttgattggagcattgttgaaataaacaaattcttcattgtcatcaattataaaggtgtcctcgtgaatgaccacttgcgcatttccttgggtttgtatacttgcaattgtgtctgatcccagaacaaaataatcctctttgttaattaagaaaaacattgtctcagcagtttgcggagaaactactaagacttcaagttctcccactttagagtatcctgtagtaacggtcgtaccattgataaacagtgtaccaccaatcacaccaaagagtgacccttcatacctaatagacggacgttcctctgacaaactaatggtatggagcttctctcctaaaagataaattacaaagaagagctggctcgcatcaagtctattatcaataaagaaattttgttcttttatctcttctccgatttcaaaacctttactgctcataagtacctcctattttccaagattttttgttagctcctgaattttcttattgtactcatccaaaagttgttgtttcttcgcaccatccattgtggtattaagcttggtcgtctcgtaaagattagtatatgctaataatgtcaactgaacatcacctaaattttgtgcaaggttcaaggcttgtttaaaatctccacgaccactataaacccagtaatttaaggtattatcatccgatttggttgaaatattatttaatatagcttgtttctgcgtcgttgttaaatctgataaattgacagaacttacagctagtatataacgtgctgattttggcagtttactaggagaatagttttgcaaatcggtctgcgttttgtcatagttatttgtcaagaaatcagtctgcgcagtaataattgcattttgcttttgactgttactgtaataatagtaagtaaaccaacctaaaacaagtgcaagaataatcgccaaagttccaaagtatttaaagaaacgatagcgtcccttggatacaaaagcgatatttcgattgattttttctgtttctttttgtaactcctcatcaataaattcagctatttcctgggtgctctcaaaactattaatggtttgactgaacttatcattcattgccagggagccagaaacaagtgactcaaatggtactttagaattaaatatgtaaaaaataagggctttatacgattttaaaaagtccactggagtcatatcaaatggggcaagaagcttatgcaaaccaaaatgaacaacaaatagtgtttctcccatcaatagtatattttctggatgaagaaaaggaattttgaattgattttccagaccagaaagtgtagcaagtttttgtgccaattttaatctttcaagacgcgtctttgcaagtcgagtagcagatgcaagacttttagcagcttcaggaacagggtaagaaagtacccatgtctcattgtcttcattgacaataactttgtcagaaagttctttaagtacggcttccttaaattgcgtactttctaagcgtacttgaaaaaaatctttatttctttcaaactcaagactagttttactgttagatattttcattcaaattctcctgcctttcttgtgtgggaagaatgcaaaaaacatccccactccctattggcaattcttttatcaaatcagtatcatcaacttttatgtttttatccttcaatttaagcgtccaattttggggcattactccacccttaagcacttgatgcatgagttctgtaaaacgccccatcgttatttctgtgggaatacagaaatccaactgttgcccatttaactcaatacttatatcaatgcgttcgctcatttttctttcttaacctcctttgggcatttttttgtcctaagaaaatcgctaaaacaatcaagggaacagcagctagtaaaatgacccaataccatatcatcgttttagaatcacttgtgctcgtactagatgcaatgacttgaggcttgtaattgacaaagagttgttctacaaccttttttgtgtttgcattgtagagtgtatttattgcctgctttgagaaatcaagtgtctctctttgttttggaacattatcatgagcctgctcttttgcgagcttgtcaattgtaggtgtaaaaagctggcttcgtattgaaaagtcacttgttgttccaacgcctccatctgaattggtaatcacattaggattaagctggaggcttccattatcaactgcaaaacacttagggctggccaaaaatactatccccaaaaccatacagatgaatagtaatagtccactttttaacaaaagatgccaccaaaagtagcatcttgctttattagaaaccgaagctttgagcatcttgtgcatcacgttcagcaacagtatctgcgtatttgttcaattgttgatttacgctctcaagaaggttttcaaactgaacaacagtttgatgaagttgattgtattgttccaaatacgcttggaaggcttgtcctttccattcctcagcgattgtgctattcattgaatttactttttgaattgcttgatcgatttcttctttagattgaatataaacctgagcttgagattttaactcttcaggtgttacagatatttgagccataataactcctccttatatatatctttggtattgtttgctacagttaaatacgaaatttaataccattcgtattcattaccaaacttttcccattgcagatttattatattactctcatcttcgactgtcaatggtttatttcaagggttttcaacagtttacatcttattgataattataacgaaataattaatattgtctttttgtgtaaatccctaaaagttgctttacgtattgtattatatataaatatattaggtagaaattcagttaccttttacattttatattggggcttttcaccacataaaaaaatgccaaagctctaaaagctttggcattaactctcttggtgctccagataggatttgaacctacgaccaactgattacgaatcagctgcgctaccaactgcgctacaggagcatacttacgaaatatattttactacattaatcccttttacacaactttttatgaaaaaaattgaagttctaacattgtaatttttatttctgatgaaatgctactaaaactttttatattttttgaaaaagtaaatttatcccacaatcgctttgaatacctcctaaaatcttaatatttaaaatcctttttgattttgactttctttgactttcgtactatcatatacttgtaaggtgaagagaagaaaaacttcaaacattcagtattttctaaaaatattttgattcaattcgctttgcacctttaatgtatacattgaataaaaaattaaaataagctaataactaaaaaatatttaatattaggaggttttaattatgtttggaatggttccttttagaagaaataataatggtttaatgagaagagaggattttttcgataagatgtttgataactttttctcagatgactttttccctactactacattcaatggaaatgcaggcttcaaagtagatataaaagaagatgatgataaatatacagttgcagcagatttacctggtgttaaaaaagataacattgagcttcaatacgaaaacaactatttaactataaatgcaaaaagagatgacattgttgagactaaagatgataacaataattttgtaagacgtgaaagaagttatggagaacttagacgaagcttttatgtagataatattgatgactcaaaaattgatgcatcttttcttgatggagttcttagaataactttacctaagaaggttaagggaaaagataatggaagaagaattgatatccactaagtaaaaaagttatacactgttgataactttcttccccctacttatccacagtagtatgatttttatattaacaatgttaataactataaaatataaaaaacaacttgtgttatccacaagttgttttttattattcttgatgaattacatctaacctaccaaacttactgtactgaccaagccaagcaagattaacagttcctgtaggaccatttctctgttttgctattatgcattctgcaacattcttttgttcagtttccttattgtaatattcatctctataaaggaacataacaagatcggcatcctgctctatagaaccagattctcttaagtccgaaagcataggtctgtgatcatttctttgctcaggagcacgcgataactgtgaaagagcaataactggacaccctatctcctttgcaagtgcctttatagatcttgatatctcagatacctcttgctgtctgctttctccatttccactcataagctgcaagtagtcaattactataagatctataccatgctctatttttaatcttctgcatttagacctcatttccattacgctaactccagcagtatcatcaataaaaatcttggcatctgcaagcggtcctgatgctctagcaatattatcccaatcttcatcttcaagatttcctgttctaagctttaacatatcaacattagcttctgagcatagtaacttgtatgcaagctgctcctttgacatttctagagaaaatattactacgctcttgcctgcccttaatgctgcatactctgctatattaagagcaaatgtagtttttcccattgaaggtcttgctgcaataagaaccatatctcccttttgaaatcctgatgttttatcatctaattcaggaaaaccagacggaatccctgttatttcccctttgttgttataaagtttctctatctgttcaaaaccacgctcaagtacaacattcattgcttcaaaatcacttgtaactttattttctgctatatcaaatattcttttttccgcactgtctagtaccttctctacatcatcctgcttagaataactttcttcaattatatccgttgaagattttataagttttcttaacactgccttatctttaactatttttatataagattgaatgtttgcagtagatgctatggaatccctgatttgagttacgtatgttattccacctgaagcttcaagcttatccgtagattttaaatgctctaaaagtgttatcaagtctactggtatatccttttggaaaagttctaacatagcattaaaaataatttgatgattctggcgataaaaatcctctcctcttagggattcagctgcttgtgctatacagtttttatcgcttatcatggaacctaaaacactctgttctgcctccaggttttgaggcatagctcttaagggtgcctccatcttttacattcctcctattttttaaaaactatattaataagctcttctatgtttgtaacgcttttaacttctatatctttaagtccttgaggaacatccttagcattatcttcaggaacagtaacaagctttattcctcttcttcttgctccatatatcttttcaaatactccgcctacaggtttaatctttcctcttaacgaaatttcacctgtcatagcaacatcctgtctaacttctttatttaaaattgcacttaatatacatatagttatagcacttcctgctgaaggaccatctatcttacctccaccaattacattaacatgtatatcatagtctttaatatctttatctgttaatttcctaataacagacgcagcattaaatactgaatcctttgccatacttccagcagtttcattaaatcttatagttccttttcctttttgctttgcttcaaaggcttcagcttcaatttctatagttgaacccataaatccactaactccaagtccaaaaacatgaccaacttcatactctgcgtcaaaaatattcttttcgtatggagttaacctacttattccaactatagtttcaacatctttaacctttatttcaaccttgtcactaggttctaatccttgactataaagaacatatccataaacatctgctaatatatttatagcccttctaccctgaatcgtgtatctacttattaattctttaacaccatcctctagtagaacatttaatttatctgctgcattatcaattatatccataatgtctgaagatgacaatggctcaaaatatacctctgtacatcttgatctaagtgctgaattaatttcagatggatccttagtagttgcccctattaaaacaaaatctgctggagctcccttttcgaaaaaatattttatatacttaggtacattttcatcatcaggatcatagtaggaggatgaaaactctaccttcttatcttcaagaacctttaaaagcttgttttgaagcataacatcaagctctcctatttcatcaataaaaagtactcctccatgtgcatctgttacaagtccgctctttggctctggaactcctgtttctgcaagatctctcttacttccttgatatataggatcatgtaccgaacccaaaagaggattggttatttctctaggatcccatctaagagttgctccgtctacctcaacaaaatttgcgtcttttttaaacggagtatacttaagctttttaacttcttctaatgctattcttgccgctgtagtttttcctactcctggaggaccataaagtataatatgttgtggatatggtgaggctagttttgacactagtgcctttattgctctttcttgtccaactatctctgaaaaggtctgcggtctcaacaagctttgtatgctttttgatagttttatcttttcaagtttttttaatttgtcatatttcttcaaagtacttttattttccgggccttttttctttcttattatgccaagccttacttcctctaagtacttattttgtcttttaactaaggcatcctctacttcattttcaatttcgttttgaatataccttttagcaacattctcaacaatccaattggtagtatcctcaactgcttcatatgtttcttcttcatttgtaggaataacagctattcccttaccttcacttataattttattcactgcatatattttctttgctgagtccttgctagatagatatttattaagcttatacttaatgattcttgccctaattgtcttatcgtctaaaatgttctttacagtatcatataatgcatttacttgaacatctaaagggatagtcttgctatcttcttttcttatctcttctgaatcactctgtaatttcacctgttaacccctctcactaaccttctgaaatcaatacatttatttttgttgaaatttcaggatataatttcaactcaatttcataatttcctaattttcttatagtctctgaatttacttttttcttgtctatatctacattaaattgtttcttaatttcagcagctatatctttgcttgttattgctccaaataatcttccgttttcccctgcctttgcagaaagctttaaaacctttcccttaagttcattagcaagtttttgagcttcttctgtttcttgaagcttctgttttctttctgcatccttctttaaatttaaaactctcatgttagagttatttgcttcttcagctaatttcctagggaataaaaaatttcttgcatatccatctgatacgtttataacttcccctttttttcctacgctctttatatcctttaataatattactttcatatattattcaccttcctctaagtatttgtctatagccttaaccaaactgtttaacacatcctctgtagaagacgcctttacctttgctcctgccatggttatatgcccacctccacctaaagcttctagtactacctgtacgtttatatctccaaaggaccttccacttataagtatgttgttttttatcttaacaagaacaaatgatgctttcatgcctgttatgtttaaaagttcatcagcagcttgtgcggccattatattgctatctatttcttttgggcatatggcaatagcaatattaccatgaaaaaccctagcagacttaattatttcagatttttttatataattttctaagtcatttgaaaaaagcttttttatctcaatagtatctgcaccatttttccttaaaaaagctgcagcttcaaaggttcttacccctgttttaaaagaaaaattcttagtatcaactacaatacctgcaagaagagcctctgcctcaattggtttaagcttatgattctcatccatatattgtatcatttctgtaactaattcagaagtagatgatgcatatgactcaatataacttagaatagtatcttttatataatttgcagcacgtctatgatggtcaataacaaccactttacttatttcttctaagattttttcgcttagaacataatttctactattaacatcatccaatatcaaaattgaaccttgatctataagttcgatacaatcactgcttctcataaaaacatttttatattcatcgtaattttctacaagtctattaacaattccttcaacacttgaactagtatcatcaagaacaatgtgcacatctccatctactttactgcttagtacactatataatcctatagcaccacctatgcaatctatatctggatttacatgccccattataaaaacatttgtactttcctttactagttccactaaagactgtcctatgactcttgctcttaccttagttcttttttcaacttcttttgtatttcctccatagaacagcagctgctctccatcttttattacaacctgatctccaccgcgtccaagcgctagctccttagctaaaacagcatagttgtaattttcaataggtgtattacctgatttaccaataccaatgcttaaagttactgctaaactattttgcatatctatttctcttatttgatccaatatctcaaaccttttctctacttcctttttaagctgcttatcttggatcactagaacgtatttacctgttgaatatttcttaaacatggcatttatatgtttagcatagctaattatcactgtttctatttgtgccttaagtaatggtttcttatcttcaggagtactttttaccacctcatctaaattatccacttcaactagtagcactgatgttttacagtttgaaatttcttcttcaaattcatgcctatctgtaacatcatagaaatatattaaaaatatttctttattcttctcaaaaattttcattctactgctgtatatatcataatatttttcttttatcttaaaatttttacaaggcttattatctttagatagtaaattacttaaatctttatcttgtattactgatgacaagttgtttcctaaaatatcatcattaaatacattagaaatactttgattgtaccataaaacatttcctttttcactgactattatcactggaaatggcaaatttataagaatatttctcgcagctatatctgaactagatgagaaatcttctataaagtttttccactcatctttttttaatctcaacttttcaacatcataaccaataaaaaacaatgtgacaattaaagctaatatagcatccctataatgaccatacacaaacattaatattataagaattaaactaataaagatatatgataaattttgatcataaaaacctctatactttttcttcattatatttcaccctgttttttattacttttttttataccaatctttctgaaatccataaacgaatcaacaaatgctaatgccatatatacataatacaacaattgaactaataaaattcctactactaaaattaaggcaataatccaattactaagtttttgtttaaattttaaataatatacaattaacgataatccagttacaattaaatacaatcccattgtcatagataccgtataatatatataatcccctaaaattatatttctagttttaagtactaatcctatacatccgagaattattgaaaaagccaaaactaaattattaatatatatgttataaatctttagctgataattcactttaatctttaatctattaaatattctttctcctacaaagcaagtgaagtaagctgaaatagtagataatattgtaagcagtccaggaacaacattaagtatattttgtcttgtaaagctttgccttaaaatatccaatgcgtcatcaacctgctgtttattcatgcctgcctctaagtacatcttgccaacatcattaatgcttgattttgccgaattcaccatatcatcaactatatttataaatgtaatgttattagatacctttagtattgctgtatattcaaatactgttgctgcaatataagctatactcataataataaacgtttttgaaaaacttaatccctttttagtgcttataataaatacaactgaaggtattaaaaacattaccataactaacgccgctattttaggatctataaaaatacaactaagcactgctgcaattactacctctaataaggaatgcttaaatccatactttaaatacactattgcaaatggcagcggtgtaagaaacatcataaattgaattataccatatccgtatactcctaaaaatactaaaacaaataaaattacagccattaaggccacttcacctatagctcttacattataattttgcactgatatttcctccaaataatattaaattctgtcctttaaatgcctatatagttttgtaagatccttcccatccttttctatatcatcttgttcaacaatacctagctttaacttttttttcattgtctcatctatttccacatgtgaatatcctaatcttccacctagtatatataataatattattgcacttgaaatacaatttagtattgcatcttgagcagcatttgtacctttggtcaaaaccttaaaaaaatcgcctattacgcataataaatctgcctttagaccctcaatggtttttatatcagacattattttaaaattttctttcttcataaataatccccctgtcttaactatattttagttatctttttatatttatgcaatataaattaagccactcaacctatatttaatactaaaacgaatacatataaaatatgtacatatttcttcttttatttaaaaagtcacctaataagcaaaccctcttgcataatattgcaagagggatgtccttacttatttctttgatgctgattttatagtatttccgtttttatcaatagactctgtactcttaacctcagttttaaatatcttccaagcaccatttacaatcctaaggtgatatacccctgtagttctgttatccttgtaatctgattttttcttatctattgaagtttctacgaaatcaacagttgtatctttatcagatttgctttttatatccgcttgctcaagagtatatacaatatcatacttattaaaggaatcaagcatggaatccttaattttattgtaattatcattatctgtaggatctattgtatccatataatcatcaagcttcttatcattagctttctttacattcttatataaagtatcgtatactggatccttatattctactcttgttacattttcatttgttattttccaagttccatttatattcttcaaataatctacgtacatagttctgttatctaagaatccaggtcccttgatttttgaattactctctataacttgaacttgtgcacttttggaatccttatttaatatcttcatgtcctctattgatgatttcattttatacttagaaaaatcgtcttgcttatcttctttaacagttttatatatacctgatttctcatcatagtttttcatataatcatcaattttaccatcgttaattgccttaaccttattttctataatctttgttatagtactatccttggtaactagttttttactgctacctactttacccgagctactacttccgcatccaactagtgatgcacttactgatatcgctgctataaatgaaaagatttttttcatctgttatcccacctacattcagataatttatttaaatcactgttttctattttaacacattaccttaacataaatcaacactagtcaaatgctgttaacttttaattcaaaaatacagtttataattacaaaaaaattaaaagctgttccaagataatatagaatatcttggaacagccaccttttttaaaactactctgttgtaaaaggtaataaagcaatgtttcttgctctctttattgctattgttaactctctttgatgttttgcacagtttccagaaatacgtcttggaagaatctttcctctttcagtaacgtattttctaagcttatttatgtctttgtaatctatgctttcgcttttttccatacaaaaagaacagatttttcttttcatttttctgtttcttccaccattaggtctttttccgtctctatctttgtttccgttatctctagccatctttttccctccttactttaagaaattaaaatgggatatctccatcatctattggtgttatatcattattatctggtaattgcattgaaccattttcatttccattattaaattgatcatttgccatggagttattattagaagatccccattcaagaaattgaacttcttcagctacaatttcagttacgtaccttctagtaccatccttagcatcataagatctagtctgtattcttccgctaactcccataagttttcctttactcatgtaattagccgtagattcagcttgttttccccatacaactatgggaataaaatcagcttcctgctgaccctcttttttaaatcttctatctacagccaaagtaaatgatgcaacggctgttcctgtaccgggagtaaactttaactctggatccttagttaatcttcctattaaaacaaccttattcatattaaaacatcacctttggtgtttatttttccaaactaataattaaatgtcttataatactgtcactaattctgaacactctatccaattcttttggcaattgtgcatcagattgaaaattcactaaaacgtagattccttcattaactttgtctatttcataagcaagttttctcttgccccataaatctacattttcaacttctccgccaccatttgtgattactgacttaaatttttcaacattagtatttatgccttcttcatctaatgatgggttaagtataaataaagtttcatacttattcattaccattcacctcctccctatggtctgacggctgtgaaagttttatatcacagcagggactcacagtttataattatatatcatatttaaaaaaaaatcaattttcttctttcttttctaaaactttttttaatctcttttcaaattgacttcttggaagcattattattctaccacaattaacacattttatctttacatctgcaccaactcttataatctcccatcgatttgttccacatggatgctgttttttcatttcaacaatataacctaaatcaaattctttattcacttttctctcctcctataaattgaagtttattataaggtatttctatttcagccttatccaaagcttcctttacatactttcttaactgattttcgtttgcccattgtttcatgggttttacctttcctgatacccttatatttacaccacttgatccaagttctgttattccaactactttgggcttttctactatatcttcattatccttagaaaactcgtcacaagcaatattaataacttttgttgcatcatcaatattttcttcatatgctatactaacatttacatttatagatatgggacctcttgaatgatttgtaacctctgatatatttccatttggtattatatgaagatctcctttaaagcttcttatttttgtgactctaagctctatactttctacaataccagaacttttacctattgttatataatcacctaccgaatattggtcttcaaataatataaaaaatccgtttacaacatctttaactagattttgagaaccaaagcccagtgcaactccacctatactagcaaaagttaagctaacagctgaaaataacttgctgccaaatattaaggttaatattaccgtgatgccaaaaaagtacacaccatatttaactacacttttgagtattgcacctatagttttacttctttttttatcaagagaaaatctaaaatcttcttgcttctttaaagttttatcaataaatttattgaccaattttactataatatacatcatcactataacaactagtactcttattactaattcaaagacattgtatacattaaacttcattttttgtaattgtactgtacctgtttctacatcaaatataaacttacttaagaaattcattactactcctccaataaataaatgtacttataatatatatatttttacaacttatttcaataaattttgtaaatatttatgcctatatgtataaatttttttttatttgtccatacttacatttaggaggtttgtatatggaaaaaagaattgtatttaatgttgatgatagcaatattttatattcatttagcaattatcttagcagtgagataaaatcaatagctgttaatcgtgatattgtcttcttatgcattggcacagatagatctacaggtgacagcttaggtcctatggttggttataaactaaccaaattccacaaaaataatctaatagtttttggaactttgcaagaacctgttcatgcaaaaaacctatgtaataccatggatattattaaaactaaatatgaaaacccattcataatcgcaatagatgcttgccttggtagtacaaagactgttggtaatatagtaatacaaaatactccactctcacctggttcagctatgaataaaagtctccctacagttggtgatttaagcataactggcattgtaaatgtatctggtccttttgacttcatggttcttcaaagtacaagattatatagtgtactaaaattagcagacattatatcaagaggaatacatatttctataataaagctttcaagtgaatatgattccacctataataaattttacactaggttaaaatgaatataaatataaaaaaacttccgaaataaatatcagaagtttttataatttctatttatcattaactttttcacatacttctttcaaaatgtttttttcttcttctgaaagatcataccttgataaacccttgttaataggcttagcatatactacactttcccctcttccatatatactagttagcattattccatcataattatcatctaacaatactaatgaaaaactcaaatcactaccaatattctcaaatgctttatatctaaccatagctacatttttaacgcattttttgacttgatcctgtaattcttcataaatatcctttacttgttttgaatcttcatttatcttttcaactttatctaaatatccatttataagttcttctaaattttcagcattagatccacgcattaacttcctataatctctttttaattttttcatagagtgcatactagacaaatttagtattattaatataataactagcgcacataaacctatagttatgtatacattaaattggttaagtaatttaaaaacgtcttccatttttattcgccatctccttgttactattaaaaaatgtttcacgtgaaacatttatatttttaatatatcaattatcctttgaagatcctcattagagtaatactcaatctctattttacccttatttttatttgttttcaataaaacttttgtaccaaaatagccctctagcttattccttatatcgactatatactggttttcctctttactctcttcatcatttttttctgttgtttctttatatgtttttagtaatttttctgtcgccctaacacttaaatcttcatctattatcttctgagatatcttatattgcaattccttatccgctattgataaaagtactcttccatgtccctctgaaataacaccatcaattaaatattcttgtactctttcatctaaatttaataaccttatacaatttgctatagccactctagactttccaattcgttggcttaattgttcttgagtaagattaaaatcttcaagaagtcttttatatgccaatgcttcttcaattggattcaaatcttctctctgtatgttttctataagggaaatttctaatatttctttttctgtcgcatctattatgactgctggtacttcttttagtccaagacttttagccgctctaaatcttctttctccagcaactataatatattgctttccttttttctttaaaactaaaggctgtactattccatgttcttttatagattcagccaattgaacaattttttcactatcaaagtttttacgtggctgaccttcattaggtttaattaagtttaaagaaatcttttgtgaactactattttcctcttcctttacatctgtatctacaattagtgcatttaaccccctgcctaatccgccttttttattcattcacatcaccttcccctactggttactaagaaattcattggctagatttcgatagcattctgcccctctacatttgtcatcatataaaactatcggtaatccataactaggcgcttcagccaatcttatattcctaggtatagttgtattatatagcttaccactaaaatacttcttgacttcttgtgcaacttcatttgataatttagttctattgtcgcacatcgttagtataacaccttcaacctcgagttgcttgtttaaggatttttttacgagttgaactgtattcacaagctgtccaaccccttctaatgcatagaactcagtttgtataggtattagtacactattagatgctgttaatgaattaatagttatgaatcctaatgatgggggacaatctatgaatatataatcaaatttcttattcattgcctttattttgtttttaagaattctttctctattatcaatgtttataagttcaacttcagcaccagcaagttcaactgttgatggagcaatgtacaaattcttaataagctgtgattcttgtataatatcctccaatgcaacatccgttgttaatgcatcataagttgataattccaatgtgcttttgtctattcctaaaccactagttgtattaccctgaggatctatgtctatagtcaacacttttaatcctttcatggctaaatatgtacataaatttatattggttgtagtcttaccaactccacctttttgattaaatacacttattactttcataaaattcaccaccctcgtattaattgctattttaaaatcaattgctatactttcttataataatattataaactcataatattgttttataaatagattttttgtgaatttgggcaaaaaaaaaatgtttcacgtgaaacattttttatttcttaggaattacaacagtaacttcaatagtatcatctaattccttagatttatatttagcttttatcccgtatttatcaaacacttgctttattgtatttatgtatatttgagatccaaatataccttttattcttttctttccatcagacgcaatatcattttcttttttataaaccttatctaatttcttctcaatgagctcttctgttttctttacatttaatccttttgacacaacactttttataacactcatttgtgatttcttatcagataattttaataatgctcttgcatgtctctctgtaagattattttctagaagtgcctttcttacattgttatctaactttagaagtcttaatttattagctatagttgattgctttttacctacgctttgtgcaagtttatcttgagtatatccgtattgctctattaaattatagtatgcttccgcttcttccatatagctcaaattttctctttgaatattctctagaagcgctatctcagctgactccttttcatctatatcaatcaaaataacaggtactttatcaagaccagctatttttgcagctctaaagcgtctttcacctgcaactatttcaaacttgtcatcatcaacctttcttactgttattggttgaattataccatagttatctatagattcagctaattctttaagagctgctttatcaaagtactttcgaggctgatttgaatttgcacatatattgtctacagaaatatataaaacactatccatataaattctcattccttttcatcatcatattgcatctatattataggatttttagacactttacctgcttttcttggatattttttaggagtaccgttttgtttttttataacaactaaattatgctgaaaatcctcattttcaaattcaacattaatcactttatctaatgttccgccaagaacttttatcgcctttttcgccgttgatatctcatcatttattccaggtcccttcaaagcgaccaaatatccccctactcttgcaaaaggaagacaaaattcactcaatactgccatatttgcaactgccctagatacagccacatcaaacttttctctataatccttatctacaccaaaatcttctgctctaccatgaacagtactaatattttttaagtttagttcttttataacctcatttaaaaaattaaccctcttctgaagcgagtctagaagtacgacttcaatatcatcattcattatggcaattggaagccctggaaacccagcacctgtaccaacatcaataatacgctttgccttaactatatgttcacactcaaatatctttattgaatctataaaatgctttttcactatctcttcgtcatctacaatggatgttaagttcattaccttattccattcttgtaataattccttatatctcataaacttaccatatttttcctcggtaaattctatcccaatttttttgcattctaaactcattatatcaaaatacttcatttttttcctccattttatatgatattacttatttttaaaataataatctaaataaatcataagaacagaaatatcagatggagaaactccagatatccttgatgcttgccctaaatttactggtcttaacttacttagcttttgaatcgcttcagttcttaaattttttatagaattatagtcaatatcctctggtataactcttttctcaaattttttaaattgatccacttgctcaagttgtttttctatatatccttcatattttatcattatattaacttcatctattatatcctgtgccaaatcttttctatctatatccaaagtttgcaacttatcataatctaattcaggccttctgattaattcatacaaacttataggtttttttaaagaaactgatcctaaaccttctaaaaagtcattaacttcttttttattggtgatttgaaccttttttaacctatttaattcttcttctattgcattttttcttcctataaatttttcgtatctattttcatcaactaaacctattttatgacctaattcagtaagtcttaaatcagcgttatcttgcctcaatagaagcctatattcagctcttgatgtcatcatcctatatggttcattagttcccttagttactaagtcatctataagaactcctatataaccatcagatctgcctaatataagtggctctttatttttaaccattaaagctgcatttattcctgcaattatcccctgtgaagcggcttcttcatatccagaacttccattaaattgtccagcaccgaataatccttttacgtctttaaattcaagagaaagcttaagctgagttgggtcaatgcaatcatactctatagcatatgcagttttaagtatttcaacatcctcaagcccaggcacagtttttagcatttttatttgtacttcttctggtaatgaactggacattccaccaacatacaaatcatttgtattttcaccttcaggctctataaatatctgatgctgctgtttatctggaaaacgcattaccttatcttcaatagaaggacaatatcttggtcctacactttttattgtaccattatacaatggtgacctatctatgttttcctttataacctcatgagttttctcattggtataagttaaatagcaagatatttgctctttttctagtttgtcgtttaaaaatgaaaatggtattattctttcatctccaggttgttctaccatttttgaaaaatcgacacttcttttattaattcttgctggagtaccagttttaaatcttcttagttttattcctacatctattaatgattgagaaagttcattagcaggaaatagtccacttgggcctccactataattaacctctccaattattattctagatcttaaataagttccagtagctaaaactatggtgttagctgtaaaacatgctccattcttcgtaacaattccttttaccttaccatcttcaatatcaagagaaatcacctctatttgtcttaaatacaagtcttcttgattttcaagcacatttcgcataacctctgaatatcttaccttatcagcttgagcccttaaagaatgtactgcaggtccctttgatatattaagcattcttgattgtatgaaagttttatctatattaactcccatttcaccgcccaatgcatctatttcctttacaagatgccctttagccgttccacctatattaggattacatggcatcatagctatactatctagattcatagtgcacataagtgttctacatcccattcttgatgctgcaagagctgcttcacatccagcatgacctcctccaatcacaattacatcataatcaccggaaaaatattttatcatatctcattcacctactttcctaaacaaaaatctttaaatattttatcaattaaatcttcttggagagtttctcctgttatttctccgagagctgtccaagcattacgtatatctatagatgcaagatctatggccaatgtatcttgaagagcttttaatgatgtagtgcagtgctctcttgcccttaaaagagcttccttatgtctcgtattagtaatcattgtattactatgctggagattacccgttgcaaacatattttctatagtatccttaagtttttctaatccaactttttcttttacagaaaactctataatattatctttatttaataaatctaatttacttttatcttctctatttttaagatccactttatttaaaagcacaatatactttttatccttaatataatcgattatctccaaatcttcggcatctatttttttacttgaatctatcataaatattataagatcagcattttccatcttttcttttgatctttcgacacccattttttcaataacatcttcagtctctcttatacccgctgtatctactattttaattggtattcccgaaatatttatatattcttcaataacatcccttgtggttccaggaatatctgtaactattgctcttttttcgtctaaaagtagatttaatagtgatgactttccaacattaggtttacctataataaccgtgttaaggccttctcttaatatctttccttcatcagcacttaaaatcaattcatctatttcctttaaaatatcatttaagtcttttgatacattttcagccgtaacctcttctaaatcatcctcaggataatctaccgttgcttctatatgtgctattatttcaagtattctttgccttaatttatttatttccctggaaatcacaccttctgattgagcaactgctgatttcatacttagctctgttttagaatttataatgtccataacagcttccgcttgacttaaatcaagtctaccatttaaaaatgctctttttgtaaactcacctggctccgcaagtcttgctccagcccttataatttcttctaaaactcttttggttggatacatacctccatgacaatttacctcaacaacattttctccagtaaaactcttaggtcctttcataaagcttacaattacttcatctattatatcaccattacttaactcaactatatttccatatctcatggtataagtattcatttcaataataccttttttacttttacctttaaacaccttatctacaatacttaaagcttcttttcctgaaactcttattatagatattccactattcccgattgctgttgatattgctgctatagtatcaaattctttcatatatttttaagtaagatataaattaatcttacaatatcctcctttcaattgtcctgaattaaaaagaaagccacaaaggctttctttttaatttaggacttttttagctctactacaacccttctgtgaggttcttctccttcactataagttctaacatatttatcattttgcaatgctgaatgtataactcttctttcatatggattcattggctccaatttaaaaggactcttctcttcttttactcttttactaatttttaatgccaatctctttaatgtctcttctctttttgctctgtaattttccgtatcaagaataacccttttatattttccatccgcatgatttttattcgcaactaaatttacaagatactgcaaagaatcaagagtttctcctctatatcctataagtagccctatattttttccaaacaaatttacaaataaatcattaccgatctctttaatctttatttcaataacaaggttcatatcttcaaaaacttttcttaaaaatgttcttacttcgtctatatagtccgtttttagggtaactttaacttttgcctctcttttacctattatattaagaagccctttactaccttcatcaataactttaatttcaactttatcttctgttacctttaattcactcaaagcttttttaacagcctcatctacagtctttccaagactttcaatgcacttcattttaaagccccccctacacaagttaaacaaaaacattattttttcttgttctttttattcttcttattatcaatattctgtgaaataatattactgctatcctctacgctgtttttttctgcttctaattttgctgttactgcagtaataataatctttgattgtgccatttggaataaattacttaccgtccaatacaaaacaagtgccgcactaaagttccaactcatccaaagtaagaaaatggacattcctatattcatagtagtagtttgttttctttgggcaggatctgaactcggaggcatagttaatatacctgacaaatatgtagtagcaccagatactataggtaaaatccatgtagtccaattactgaatgtagccttttgcgataaatcatgtatccataaaaaccctattccttttatatgtaaactataaaaaacataatataacgcaattaaaataggatactgtataattaataataaacatcctccaaaaggattaacatttttctctttgtatagcttcattgtctcttgttgcaatttttgtggatcacttttaagcttagtttgaagcttttttaattctggctgtaacgcattcataagaacagaagatttaatctgttttatactaaatggtacaagcaaagtctttattattatggtaagaattattattgctagaccataagaatagtttttatccggtacaatattataaacgaatttatttattgaatcaaaaaactgaacaaacagattgttcaaggcatttatcttaaacatataaaatagaacctcctaatttttatttaacggggtcatatccaccttttgagaaaggattacatcttaaaattcttttcacagccataaagctaccctttaatgctccgtatttttctattgcatcaatagcgtattgggaacaagtaggaatgaacttacaacatgcatttcttttaagaggtgacaaatatattctataaaactttattgatttaagtaatattcttctcatcatatataactaagcctgccttattaaacaaattttttatagaatcttctatatctgaataacgtttaccattgcaagctgttctagctataataacaaaatcatgacctttttttaaattactagaattcaatctataactttctccaattaaccttttcactctacttctaactacactcttaccaacctttttactaacggatattccaattctatttatatcctttaatatataatttttatagacgtacaaaactagcaatctatttgaaaaagacttcccttttctatatactcttctaaactcggcattttttcgtattctattttccttcataaaaaactgctccttaaattgcagaaaaaggccacacaacgcggccttatgctgtcaatctttttcttccttttagtcttcttcttttaagaacttttcttcctgataaagtactcattctttttctaaagccatgttctttttttctttgcttctttttaggctgatatgtcataaacatgtttacgcacccccttcaatatatttactacgttatagaaatacgttttttccaaattaaagttttactttataattatatatttcaatatagccaatg

SEQ ID NO: 16 - DNA, 192000 bp, Clostridium acetobutylicum
gattgtataatgcaattatagcatatttaggaggtatttaaaatgaaagaatataaatatactgttattacaggagcaagttcagggataggatatgaggctgcaaaggcatttgcaaaaagaggaaaaaatttaattattattgctagaagaagagaaaaattagaagagttaaaaaaggaaatcttacattataatagatcattaaaggtaatagttaaaagtattgatttgtcaattacatctaatgtatatagtttatatgatgagcttaaaaattataatattgaaactttagtaaataacgctgggtttggcgattatagcaaagtaaataatcaaaatttagaaaaggttgagtctatgcttagcttaaatatagaagcattagtgattttatcatcattatttgtacgtgactatgagaaaattgaaggtacacagcttataaatatttcatccgcaggaggatacacaattgtaccaaatgctgttatatactgtgcaaccaaattttttgtaagttcgtttacagaaggattagctagggaacttatagaggctaaatctaatttaaaagcgaaggtattggcaccagcagcaactgaaacagaatttggtaaagtagcaagtgatgtaaaagaatatgattatcaagagaaatttcataaatatcacacatcaaaacaaatggcagagtttttaattaaattatatgataatgattatatcgttggtaaggtagatagaaacagttttaagttcacactacaaaatccaatttttgattatgcttaaaaggtaaatgtaatctataactgtatataaggttactttaaatattagtattaggtattagggtttagtacttattataaccctaatacttaatactaatattattctttaaaatgttgaataaaaaaagagaagaaaatgataaaatcaaaaaaagtaaacgaacacattgaggtattgtcattattggacagtgtaaacattgttttttataaattctcaaaaaacttagaattattgattatgttgaataatgaagtgattttttatagaaaatctgtatgaattaaagttgtaagagtcaaagaaaaatgatatcttagaagcatggtattatatttaataaagtgtaaggagcttttctaataaaaaaggaacattagttaaaaaataatgaatacgttttattacaaaagcaaattagaatcggtataaatgggtaaatacaagataatggtgagaatttagcatgggtgttgtaatggttaatgacgaacgaatatcacatgttttttataagcaccatttaaaattaaataaagtttcatggagggctcaatatgaagaaaaagaatgtagttttgagtattgtccttgcacttgtatttatattattttattcaggtagtactttaaaagccgattctaataatgcagcaatttcctatgaagcacacgtacaaaatataggttggcagaattgggttaatgatggcgcggaggcaggaacagacggacaggctcttagagttgaagcgttaaaagtaaagcttataaatgcaccagtaggagcgcaaattacctatagaactcatgtacagaacataggttggcaaaattgggttaatgatggcacggaaaccggtacagacggattagggttaagagttgaagcactagagataaagcttgtaaatatgcctgaatattctgtacaatatcaggtacatgtacaaaatgtaggttggcagaattgggttagtgacggagctgaggcaggaacagatggaaaaggacttagagttgaggcattaaggataaaaatagttaaaaaaacagctgttcaggctattagtttggataaaacttctgatatgttaaaggttggtcaaactgacatattaaatgccaatgttagtcctgtaaatgttgataacaaaaatttaagttggacatcttcagattcaagtatagtatctgtggattctagtggtaaaattgcagcacttaaaaagggaactgcgataattacagtagtatctcccgatggagctaaagctagttcctgcaagattactgtaaattctggagatttaggagtaacctacgaaacgcacgtacagaatataggttggcaagattgggtttacgatgggaacgagtcagggacagaaggaaaagggcttagaattgaagctttaaaaatgaatcttgtaaatgcgccttcaggggcacaaattacctatagaacatatgtacaaaatataggttggcaggattggtctagtaatggagctgaggcaggaacagaaggaaaaggctttagaattgaagcactagatataaaacttataaatatgcctgaatacactattcagtatcaagcttatgtgcaaaatgtaggctggcaaaattgggtttctgacggaattgaagctggggaagctggaaaaggacttaggattgaagctttaagagtaaggcttgtgaaaaaagtgcatgtgcaggctataactttacaaaaagctgatgcaagtttaaatattggagatgtgtatagtttagttgcaacaatttcaccaattgatgctactaacaaaaatatcaaatggacttcttctaatgaatatgttgcaagcgtagatgataatggaaatattaaggcactttccattggaactgctgtgataactgcagctacggaggacggaaataagaccgtttcttgtaaaattattgtaaatagtagtaataaggaagatactcaggcattagaaaaagcaaaagatattttagctcatataataaaaccggatatgacacaggttcaaaaggaacttgtaatccatgattatatagtagctaatacaaaatatgataaggatatatttcatacatatgatgtaccttatagtgtttatacggcctatggtgtgcttataaatcatgaagctgtatgtgcagggtatgcagaagcttttaagctaatgtgcaatatagaagatattcctgcaaacactgtagttgattataatattaatcatgaatggaatattgttagattagatgatggaaattattatgaagtagatactacgtgggatgatcctatatattttgatgaaaataaatcagatgtaagccatagatactttaatttatctgataagcaaatgcttgcagatcattctattaataagggcgaatgggattcaaagggttatccaaaagcggcaattgataataaagaattttattcaatcacagatgattcatacgatagtaatatggtttatacaagctatgcgggaaagctttcgggagttgattcagagggtaatgttaaggttatagctaatgatgatgcaagaaatattatttattacaatggactcatatattatataagtaatgattcaatatatagaatagataccaacggtcaaagtaaagtacaaatagcaagaaatgcttctaaaatgtatatatataatggagatatttattatcttggagataatgactgggctattcacagggttaaaatagattggaaatataataacaatgataatagcatattagcatatacttggagtgctaattatttcataaatgatggatacttatattatgaagctaatgatcatttaggtctccataaaattaatttaagtactctatctgatcaagagatattaaaagtatccgattacaatgttacaaattataaggattatatatattataaggattctaataagctttatagagccgatttaaatggtgataatataaaacttatatcaagtaatattacacaatggatgcaaatatatatgaattatatatattatagtaatgatgatatcacatggtataagatggatcttgatggaagcaacttaactaatttactaatttaaaaagattggggaaacccaatctttttaatatttatatataattaattgtattggtatgtaggacatttatataaatatgctttttcatgcatttttatataaagatagtgccataagaaaacgatataattaaaaaataaataagtttcatggaggacttaaatgaagaagaatgtattattaactattgtcctaatatttatgcttgtaatctcatattcaggcggcgattttaaagcagatactaacgaagtaggagtttcctatgagacgcatgtacaaaatgtagggtggcaaaactggtttagtgatggtgttgaggcaggaactaatggtcaaggacttaggattgaagccttaaaaattaagcttgtaaatgcaccagtaggagcacaaatttcctatagcgcacatgtacaaaatgtaggctggcaagactgggttaatgacggagctgaggcaggaactgatggaaaaggtcttagagtagaagctcttaagataaaacttgtaaatatgccagattatacagttcaatatcaggcacatgtacaaaatataggctggcagaattgggttagtgatggagctgaagctggaacagacggcaaaggatatagggttgaagccttgagaataaagatagttaaaaaggtagccgttcaagcaataacattaaataaagcctcagatgaattaaaggtgggacagacagatcaattaagtgcagcctttaatccaacagatgctactaataaaaatttaagttggacatcttctgatgcaagcatagcttctgtagattctagtggcaaaattacggcgcttaagcagggaacttcaataattacagcaactacagaggatggaagtaaaacagctaattgcagtgttactgttaaccctggcgatttgcaaatttcatatacaacacacgtacagaatgtagggtggcaaaactggtttagtgatggtgttgaagcaggaactgatggtcaaggacttaggattgaagccttaaaaattaagcttttaaatgcgccagcaggagcacaaattacatacagagcgcatgtacaaaatgtaggctggcagaattgggttagtgatggaactgaggcaggaactgacggcaaaggtcttagagttgaagcactacaaataaaacttgtaaacatgccagattatacagttcaatatcaagcgcatgtgcaaaatgtagggtggcagaattgggttagtgacggagctgaagcaggaactgatggaaagggatacagggttgaagcattaaagataaggatagttaagaagatagctgttcaatctataactttaaataaaaattcagatgaattaaatgtaggacaaacagatcaattaagtgcagtttttaatccaacggatgctactaataaaaatattaagtggacttcttctgataattatgtggctacagtagatagcactggaaagataacggcagtttctggtggaaatgcagtgataacagcaacaacagaggatggaagtaaaacagctaactgcagtattgttgtaaacagcactgattcaaaagataatcaagcactagaaaaggctaaaactgtcttaaacacaatagtacagcctggtatgacgcaggttcaaaaggagcttgcaatccatgattatatagtaactaatactcagtacgaaacggctgtttttacaagcgataatgtttctgatgatatatacactgcctatggggcacttataaatcatagagctgtatgtcaaggttacgcagaagcttttaagatgatgtgtaatttagtaggaattccaacagacataatagaggactttaagcttgatcatgcatggaatattgttaaattagatgatggaaattactatcaggttgatactacgtgggatgatcctgtatatggagacgatacttccttaagtataagccatgaatactttaatttgtcagacaggcaaatgtttgcggatcataccattgataaagataaatggcattatcctaaggctgcagttgataacagcgagttttattcaatttcaggagattcatatgactcaaatgtggtttacactaattataatggtaagctttcaagtgtagattcaagtggaaatatgaaaaccttgaatgatgatccatcagcaagtattaattattataatggatcaatatactatttaagtggttcttcaatatataaggtagatactaatggacaaaataaagtgcaaatagcaagtggagatatacgtaaaatgtatttgtataatggagctatttactaccttgatgctaatgatttttctattaacaagttagttttagatggaacctataaaaataaaaaagtgattggcattacttggaacagcagctattttataaataatggatgtttatattatgaagcatatgatgatgactatctccataaggttgatttacagtcacttacaaatactaaaatattaacagtatctgattattatgtaactagttatagtaattatttattctataaagattccaataatctttatagaacagatctaaatggtggaaattcaaaacttattgtaaataatattacagataattttattgatatattcgaaaattatatctactataatgacagtaataatatttggtataagatgaatcttgatggaagcaatttaataaaattaatgttttaaaaagaaggctgcaaaactatttttggttttgcagcctctttttattaagttaaaatcacataaagtaaataatgaatttactcaattattaattgatttttgaaaaaacacaaggagatttaactattttgacaaaaagattaatatgtgcaaggcatgtaaatacaaggattaaagcctataactaataaaaacaaaagtttttaaaacacaaaaaataaaaaaatgcaagttgctaatttatcaagaaaagcattaaaaacattagtattttagcaaaatataacctttttttaataaaaattgaaattgattttatcacaagatgtaagtataattatttacataatagtattgcaattctataaatgtaaaaaaataaaagagaaggtgtattttatgaaaattaaaacaattactacaaaattattaatgtgtacatttactataagttcaatattactgccaactacagcttttagtgcacaggcaaaaacaaaagctttacatccacttggacttagaactcttcatgaaaatattaaaggaatgaagaaggctcctaaaatatttggtgcaactaaattagcacgatctgtagatttatcaagcagatttccaagtgttaaggatcaaggatcattaggaagctgtgttacatttgcgacgacttatgctaagacatatgaagagaatcagaatagaaattggggagtaaatgttccaagccatttcttcagtccttcatacatctacagtcaaatacattcagataattctgctgatggtggtggaagccagtttagtgatgctttcaatcttattgaagaacaaggagatacatcaataactgatatgccatatgatggttcagattatggatgggaaactcaaccaacagcagtacaaagagaacatgcagctcaatataaagctactgattggcagcaacttgatagtggaaattattcagaaataaaacaggaattagcaaaaggaactcctgttgttataggaatagatgtttatcctgattttgataatatttcaccaagcaaccctgtttttgatgttatatcaggtgatgatagaggtggacatgccctttgcgtagttggttatgatgatagtaaacaagctgttaaaataataaactcttggggtacaaactggggaataaacggatatggctggattagctacaaggtacttcaacaagaaaattcagatgcatatgttttacaggattagtgtattaggttagcaatataattaaaaactgtgtgaggagatatttctataaaatatctcctcacatggttttttaattatatgatacttattatccctagcagagtaattcaattggctagttcatttaaaattgagatttatctccataatctgaacgatatacaccatttaaaccagcatatttacctatttcagataactcttttataatattttcttcgttagatgaaaaatgtagtctttctgtataagctgtaaaatatatgtatttaattaatctatttatcaaaggaatatttttttcatcagatgaatctagctttacataaacttttaataatacctctttaatatcatcaaaattgcttttttttgattgtgaaatactgttatataaagaatgtactaaatctttagagctattaattaatatcaccacctttaaggcaaattatatataaaaaccaatgtaatgtaaatattaatattatagggtctatactagtacaaagggttagggttaataattaatattaaccctaaccctttgtactacacaagttctataacaatattgtaatcatctgcaatgtaggttccataggttatttcgacaggaacaccatctgaatatccatatttggttttaagaagcattgctctatcattactaaaaccaaatacttctttatccttggcggtagatattttagcagatattacttccttagctgaagttatataaaagcccttcatttccaaatacttataaaaggaacctgtaaaatcgtcctttaatgatgcaccaaccttagggcttatataattgtggtatattgttattatttttcctttagattccactgaacgttctaacattataacattatcacccggattaatgtcaaacacttctgctacgtcctcacttgctttaacgttgtttacacttataagggtttttgtggtcttatcgtattcgtcttgaagctgcttaaaagaagattgcattcttgtagaaaagcttgttttgtccctttttacgatagtacctttacccctttgccttagtatatatccatctgtcataagtctattaagagcttgtctgacagttattctagatacgttaaattcatctgcaaagctcatttcagaaggaagagtacagcctatttcgtattctccatcctctatccttttttttattatgtttgccatttgactccagagaggtttagctccgctgctgaaatcaagtttcattttttttcacctcgatttataatttgtatattctcttagtattattggctttattatttcagtatacctattatagcctgtttctgtcaaatgtaaaccatcattagataattctttttttatgtttttagaggcttcatcaaatagtgaatcaaaagcttttttactttgaagaaaattaaaccataaggattggggattaatattttaatactacctctaactactaaatttaacttttgtttaaagaagttctgaccacctgttaataaaggaattattatttcccagattaaaagaatgactaggaaaattagtaatagcaaatccagaataaatatgaatatttatgcattaaaatacaatggttttttgttatagaaataaagcttaatattactttttgtattaatattaaaaatacgtactaaatattcatattacatattagggctggtattaatatttaaccctagtatgtaaccctggggtaattgaattatgtaatagtcttctagatgtacttgttaagatacctatagaatttgataaagtaaatttttaagcttattttatattacttgaaattgggaaaagtaatatatactagactaaaagatattcatttcattatatcgaaaaatattaaattttaaatttttttgaggtaaaatggagaaaagttatccttttattttttagaaagaagaaggtatgggttttgtttatcaattggcatattagaagctttatggaaaattgtaatataatgtatggtttgctataattgatactattcaaatggtggagggatatgggaatgattagtgcaattatagtagataatgaagtattatccgcaaataatttgtataatatacttaaagaaaatagtgaatttaacataaaagcaagggttaatagtgaagaagaagctcttttagaattagagaaaataaaggtagatattatatttataaatattgaaatgcaggtagtggagtttgtagctaaagcacgtgaaataaatgataaggtaaagattatttttattactgcatatacaaaatactcaagtgattctaatatgcagtatcttattaagcctgtaaccaaggaaaagcttaataaagttattttaaaacttaagcctaacaatgaaagtaaaagtgaggagagctgggatataaaggttagctgttttggtaaatttacagtacaaaatagacaaggtactatagctaaatggataacaaagaaggctgaagaattatttgcattattgatagatcaaaaaggaaaggctataaatacaaataagataatatatatgttatggaggaattttgatactactaaagctactgtaaatcttcatacaactgtgtacaatataaaaaaagcactttcaaggcttaatgctcaagaggtttttatttgttctgatggattttataaagttgatgtaagcaaaattaagtgtgatgtttgggaggttattagtaaaatcaggactataagtaggcgaaatttaactatagatgaggttggagaaagcataaaaattattgaagatggttattttaaggaaaattatttcgattgggcagaagataaaaataagtattttgaaagcgtgtatttaaagcttatttttataaaagcaaaagagtgtaaaaagagtaggaattttaatgaggcaattgaacttataagaattggacttaaggtggatgaactaaatgagagctttaataaagagttaataaggcttttaatgttagttggcgatgaaattgaagctataaagcattacaatttttataaaagaaagttaagaaaagagcttggcataaacgttgattgtaaaatttatgaatggataaaaagctagaaattaaactttttaaatactatgtaaatatggaggtatgtaataatgagacatagcaaactaaaggattttccaaaagattttctttggagtgcatcaactagtgcgtatcaggttgaaggtgcatggaatgaggacggaaaagggatgtcggtgcaggatgcaaaaacttcacttccagaaggaacaagtgattttaaggttgccagcgatcattatcaccattttgaggaggatattgcttttttaggagaaatgggacttaaagcctataggttttcaatttcttggacccgaataattccagatggtgatggaaagataaatacaaagggtgtacaattctatcataaattaattgatgcttgtttgagttataacatagagccaattgtaactatgtatcattttgatcttccttttgaattggagaaaaaaggtggttggaataatagaactactattgatgcatttttaaaatttagtaagattttgtttgaacaatacggctcgaaggtaaagtatttcttaactattaatgagcagaacatgatgattcttcatggagctgctattggtacgtctaaaggttctggtataaatatatggaaggaattatatcagcaaaaccacaacatgttagttgcacaggcaaaagctatggaattatgccataaactttgtcctaattctaaaataggtcctgcgcctaatatagcttcaatatatccagcatcctcaaagccagaagattaccttgctgcacagaattttacagctataagaaattggctttatcttgatatggccgtttttggaaggtataattcaacagcgtggtcataccttgaggaaatagatgctgtgccaaaaatagaagaaggagacatggagatattaagaaatgcaaaaccagattttatagcttttaattactataatacagctacagttaaagcaaataatgatgctaaaaaggtacaagattcaagtggagatcaacaattagcagtttttgaagcaggagtatttgaaggagtccaaaatcctaatcttgaaaagacggaatttgggtgggaaatagatcctgttggttttagaataactttaagagaagtatatgataggtataatcttccaattatagtaactgaaaatggtcttggagcttttgataagttggaggatggaacagttcatgatgattatagaattgaatactataagaaacatttgcatgaaataaaagaagctattacagatggtgtgaaggtatttgggtattctccatggagtgcaattgatcttgtttcaacacatcaaggagtcactaaaaggtatggctttatatatgtaaatcgtgatgaattcgatttgaaggatttaaagagatataaaaaagatagtttttattggtacaagaaggttatagaagagaatgggaataacttataaaaaatagagtattgatgtagagccttatgggttttacatcaatactttattttttaagacttatttgtgattgtgtggtataaatatattaagataaaataatattaaaagtattaagcttttattggaggaatataaacctatgaaaaaagatttgaagttatcattgatttctagtttgatttcaactattgtttttgttatagcaataaatgtatttgggaaggcaaaaggttttggggcatctattattttagcaattgtattttttgttctattttttgcttttgaatttatatttacaaagatatttggtggaaggctttagttttattaattttacaaatacaatttttttctgcattgacctttggtagatattgagctatactttccagtaaaggaaatgtcaatagtggaaaactttgtactgtaaagttaatttttataagggggaaaatagcaaatgaaaaagaaaaaagatgaagaaacagcaattagcctatttaatacttttaaaagtttgattttggaaaagagttcacaaaataatggatattctaaagttatagacattttaaatcgtgcgattgaacgcgttgcaaagggaagtcaaacaccacaaatggaggcacgatcagtatttcaaaacacttgcacaatgtgtcttgtagaaaaagtaaaattaaatgaagaagaagctgctgctttaaaggaaatagaccatttctcacattcgaaaggcatttggggagaaatgaataatttgaatatttcaaatatgtggcccagtaattaatttttaacaaaatcataaagattaagttctaagaagaatgatttggagatcttcggatgttacgacgttatagtattaagtttatgactttttataattattccaaagtttcatagttggagttaaggtattaagtatttcaaggtggcttttattacttattactttattaattaatccatccagaaatttgttatccaagtttttgactattaaatctatattatcatcatttaagttctctaaaaatcttcttagaacaagcgaattattatagttttcaaataaaggttttgcaagttcatcatatttatctaaattgcatatatcataagctgaataaacacctgttaatattgatgcaaactgtccaaaaccaagaccaggagaaattgttccaaaacaatttccaataaaatatgtattatcaattattgaattgttacatattccaatcatatattttgtaatctcgaagttatcagttattctaaaattttggtctaaatccttacaagccatattataaaatgtttcccacatagtatttaaatctaactttatattgtttggataatcgggataagcaataactaaattagcttctttttctgaaaaaggtatcaaccaaccgtagccttttggtattacatcgtaattaaaccaggaatgagcaatacttgtaagaaattcaccttcaatcgtaacaccttttatagtactcgtaaggtcgcacttataattacctaagttagtggaataagctccatctccagttgctaatattacgtactcaaattctttacataattgttcatagtcgtaagtagaattaaagtttattttagtttgtaactgtttttctaattggcattcataagaattttcatgtctgcccctaatgttcacatatcccataggtccatcaatgcttcctacttcatttttggaatgaaaaactaactttctaatcatatctgtgggagttaaacttatgtcgtaattttcttttatgtattttaagccatctttaataggtctatttagtatactaaaagtagcttctccattaataaatctatccccaacacggtttcgtttttcaaaaacaattggtttaattccatgcttttctaatgttatagcgcaagataacccagatattcctgcacccataatagcaacatccataataaatacctcctatattatatagtttctatctttgcaagttttttatacgatatttattattatagtttgtccatgaggttttaaagttatcattattattttggcagtaattatagaatttttttaaaagctgaactcttttttcagcatcagattttcctaaggaatcttgtccacttaataaatcagctccgccaattaatttttgtcgcttcattatatcatagaagcttactttctttgaatttatcatcatatcgtacattgccataaatgtggttgttctgcctttacctcctcgacagtgaaaatgaagccaagtacctttaggaagattttttacaaagctaacaaaggaattaatttgagcatcatcaggggttttatgatcaggaactgtgattcttgagtaattaatgcctaaagctttagctaattgttcttctgtttcaacgctttttacatcattaagctgtgaaatattacttatggatttcttttttgaaagtttatcaaaggtaacctttttatcttttgatatgcgcattagcttattattttcatcctttaatacttctgaacttgttaggttaaggttggcatcatcattttttccataccagcttatacctattccatttacaaagatatgagattcctgacgtaaatctatatctacaattggtttgttcccaattttattttttatagattttagttcatcctctgagaaggcaccacttccagaagcatttaagtcagataagccagataggtttaatgaaccttttttatgtaagcttatagtatcgcttgtagttctaaattttggtggtaaggtatttttgttttcagcatcaataactaatttaactttatgttccttaagtggtgttcttttaaagaagtcaaagttataaatagagatagttacaattgctgtagctaaaattccaatacagattaatttagtttttttatgcaaagtaattcctccttgggttataattaaagtttcaagaattatgatatactaaaaaaatatattcaaagttaatttatggttaaatttttaaaaattatatattttatattgtattaaatgactatttttaattaaactaaggataaaacagatacttataattagttatatcacgaaaaatagtaataatatactttttagtggatacattagctataatccagtattatatgtattaattataagtggaattcgtgagataatattagttaatagatgaggagggaatagtctatgaaaagggcaaattataaaatattatatgcagttatggtggtattaatttttggactactatttagtggcagtaataatataaaggcagatactataactggaaaaaacaacaataatataacggttattgcacatcgaggtatatattttaatgaaccagaaaattcccttgaggcaattgaagattcaataaaacacaaggtagattatgccgaaattgacgttcaagaaacaaacgatggtgttgtagttttaatgcatgataaaaatttaagaagactagcaggagtaaataaaactgttgatgagttaagttataatgatattgaaaagttaaatatatcaagagggatttttaataaaaagaagataactagaattccaacacttaatagtgtaattagaaagtgtgataatagagttaagctaataatagaaattaagccatatggaaataccgtagatttaactaataaggttgttgatattatcaaaaaaaataattttgagaaaaaatgtttggttcactctatgagttatagaatattagttcaagtgaaatctttggattctgaaataaagactggatatatagtatgtaggccagtaagaaatttatctgcatttaatgttgatttttttagtgtaagaaatatttgcgccactaaaaaagtagtttctataattcattcaaagcataaaaaaatatttgtatggacagtagataatccatatgctatgcagcatgttgttagtttaaaagcagatggaataataacagatcgacctagtatcttaatgggtaaaagagttaataaagtaactaaggcaaagaagttttaattaatatggtgctttattaatctgtattcaattaaggttaatattactattgcgagatcaaagatacttaaaacattgagccatattgaatatttaatagcacaacgatataattggtaaaaaataaatagcagaagagaaaatattgtaagaggataagcccaggtttttttattccaaagcattaagattaaaaaaagttttattataccgtgagatattaagtaaaagactccgaaggattgactgcttaacgaaaagtctgatgcaagtctcatggcatagtttgcaacaatatctttagggtcttctgacagctcgtgttgagttagcaagactattattttatttaatctagttggatttaaaaatattagtaatattcctccgagtatttcgagaagaccgtctattcctttaactaagattgctattctaaagcttttatgaagtatactgaactttcttctttttaataaagagtttttcatatcattatggtacatctaaaattccccctgaagtgtaatattatcttagtattacactttttttatatttatattacatatagtattaggggaatagctttagaaataataatgtggtataattttacagtacagtttcatagtaatttgaaaaactttagttgaatgtgggctactggtatcacctatccctttcaagggaggtgatatgcatgagtaatgatgttctaacattgctatttcaaggcggattgttcttgatatcactattgactctgatagtgttacttatagaaaaaatctcaaaaaaatagtagccccacgcgcaattggttgctactattttttatattattaaatagtgatatcagttgctcacaactgaaattgtacacaatagggtgttacagcaccctattgttattttttgtatcttatatttatattatatcaaacttaaaataaaataaacacatattttttaaagacctacttaatttctatttgcagaaatttcaactagcagttttagagcttttttttatagaggccaaaataaaagaggtaattggaagtataactataaataaaagagcatatatgggatatatatctgatgctatatataattggtccaaaggtgatttaaacattgtaattgatagtacagcgcttatagcagtaacaggaaatactaaaggtttatagcttctcagcttaaagcactgggcaatagaaattactgtagcataaagaaaaaaacaaatcttcattagaaggttgaatagcaaaaatactgcagtagttacttccactcttgttatgacttctccaacattaattaagcttgagacttgataggctggctgaacttgtagggagcttacattaccaagaactaaggtatttctcaccaaaacaaataagaagaatataaagcttaaaattaaaccagtgaaggcacttttccttaattttgtttgatcgttaagatgtggaaagaatatcataaatacaataatttcgccaagaggaatagcaaccataatattggttccctgaacgaattgccctagatttaactggagtggtgggagcagattggaaatatgtatatcctttgcaattaaagctgttataattatggaaagcattactgttaaaattgatagtatggaagatactcttgatattacttcggctccttttcttacggcataaatacatagtatagcagcagggatgataaatggtataatatctgaattttgagataagtaagtggagaaaaagtcagctagaaacctaaagtttgctggaattataaaccaaaaataaaatatgtatagtaaagaaatcaaattgactaaaagatttccgtaaattttagcgtgtatttctataattgttttgccaggaaacttgctacataaagatacatacatgaatagtaaaaatagtactataataaaaccagagattaaaactacccaggtatcctgctttgtgtattgactgacaaaaactgcagtaaaagtagaagcttcaataagggaaagcataattaaagacaactgcttgcttgatatcataccctgtgcagttaacatacatatcactacctttttgtgcaaattttttatttgtaattaagatgtaaaagattttttactataaaagttattatatttaagggatttggcacgggaagatttagaatatataataaaactaaaaccaagctcatgaacattagtattgaaaaaacagtgagatccttatagtatttatttgtgattaaagcaggaacttcatagagagcaacaccaataaaaacaattatacttaaaagcaccatagcacatacctcatttttttatttggccataataggtttactaattctaccatttcttcttagtttacaatttacgtttacttcaatattgagatttttgaaggttttgttccactgaggttctatctttttaaagtattttggatgtcttctatatatagcatccccaaaaccaaatatatctgcatttaaatcccttgattttagaattgcagcttctatttgctttttaatagtttcttcttctgctttttcaattactttaaagttatcaggagttgcgagattttcagatgaattttgttctaataaattaccctcctgctttatgtttatcttcataattagtttgttatccttaagtttagccgcaatcttaccttttgaatgaattgtttctacatcaatagttcctttataccctggcaaatttacaggtacaacgccagtctttactttgttaagagcccaaagtaagcctctagtttgctggctatctagagttcctatcattttatcttttttaaaaacagcagtacttgtaagacgtaaagctttagttccagcactgttattagttgatatctcaactattggtataataggggcgcttgttttactcattattctttctgtaaagtccttaaggtttattgctggtatttcagaaacctctttttgctcactaattaattctgctaaatttcttccttgagtatcttccatattgggaggtacacttaatatgtctttaactttagatttggttattaaaagccataccaatagacgagtttctctatatcgcataaaaaaatccagatattttgctataccactttttgcagcactctctcctaatacaataacttggttatgagaaaagaatagctgtctatctaatttacgattaaaggtttttactattttacctaacccatttccggtttcagttaaattaagagtaacgttatttgcagaaggtgcacttccaccactacttattgaaccgcttttattactggataacttggctagttgaatggtcatttccgtgtcatcacagttttctagtttatcgattcctacagcaagcactattgctagtttatttagctcccttgaatctatacatgaggttaaatttacagctattaatatgcaggagattattttgagaaatttttttctacaacttttcataaactttcacctcgcaaaaagtatctattcctttgagtttctatgggagggttttactggtttgtttccagaattactttttcttaggttatgccaacctatagttcttggtcttgtaaacatactccacaaaggaaatcttaaaaatgagtcctttaagtctcttgcagtaactggtgctaatggtgacaagtatggagtgccgaaggatcttaatgacacaagatgaatcaatacagctaggagtccaattcctattccatatatacctaaaagtgctcctaaaaaaagcaataatagtctcaaaatagctgtaacgtctgtgtaagagggaacaacaaagcttgctattgcagtaagagccacaactataaccataatacctccaactagtcctgcagatactacagcttcccctataaccaaggcacctacaatactaaccgcctgacctacgttacgtggaagccttataccagcttcccttaatatttcaaaaacaatcatcatcattaaggcttctaaaaaagcgggaaatggaacgccttcgtgggcagctgccatggtaaatagcagtgttgtcggaattagttcctgatgaaaagtggatagagcaacgtaggttactggaagtaatatacttattgaaaaggaaacaaatcttaaaattcttatgaagcttgcataatatggtctagagtagtagtcttcagagctttgaaaaccttctataaaaagcataggaactgttagagcaaaaggagttccatcaactaaaattgcagctcgcccttcaagtatctttgcagctactatgtctggcttttctgagttacctattgttgggaaaatagaaaaggattcatcttctatatattgttcaatatatccagactctagtatgctgtctgtatcaattttatctaatctagtgcgaatttcttcaataagttttggatttacaacattttttaaataaactaaacatatatcagtatctgtttgtttacctattttcatattttcaaaagtaaggtttggatttttaattttacgtcttagtagtgacatatttgaattaagattttcagagaacccttctctcggtcccctaatcacaacatctgtttttggctcttctattgctcttgaaggccaaccctgagtatctactattagagctttatttgatccatctaaaagaaatatagtatttccagaaaggcaagtagaaactaaattatttatgtcatcactttcctttacatcaccaactgaaatcagtccatcttttactacttttaggattccgcttgataagtctggttccaaagattttattctatcatcatacataaagggcttcattatggtttggtttataattttcttttctgtaagtcctttaaaaaaaatcaaagctgcctttatttgcatttttgaaccaaaggagaactctctataaattgtatcactgctagttccaataatgcctttaagagtatttaaatttttcgtaagacttgatgaaagtttaagttcttttttagaattttgattactttcataattagttggaggtttatgttttatgaattttaattttttgtttaagtaactaagcaactgtatttcaccagcccttctttttaaatcttaattttgttttttatttttatctgaatttttttttacgatttctttaaattctggattatcatatttaactttaaaaatatataaaacaagctcccaaataaaaactagaaatagaatcaaagaataagtccaagttgttataaccattagtatggggtaaaagccgcgtccttttacaagagttttaaaagtattcattaggtgtacaaacatttaaaaaacctcctaaaaatataataattacacctataaaaaagtattataggaattaagatgttcgagccaaaacctctaaaccaattgttaatacaattctttgtaggtagttattaaatatttgctatagtttaaccataaatttaaaaggttattctttagttctctggctggctgcttcccccttattatagttcagctcttttcttttttaatatgtagataagtagaagtaattgaggatatataagggcgaatgggagaccatagtatcttgcatcaaaaggaaacatccactgatgatatgcaaaactgggttcaaaataaatagaaaaatacatcataaatattcctgtaagtatcaacactagttggcttttctttatactaaatactgagtttataattatagcaattccatttaaatacagagtcattttaaaaaaaccacctaggaatataatgattacacctataacatctaaatgtgttattatatcacctatattaattaatcttaaagtttctactaatggaatggtcgcaatagaagtatattttgctcctaatgtacagatattgatcatagttgtaaaacaaagaagaatgccggataaaatgactgctttaaaggaagccttttttatagtatttatgtcatttacataatgccaatacattaaaaatacatagatttctccaaaaggaaaccaaactacacctggtagcgatttaagtattggttttaagccgtcacccaaaataggagttaagtttttaaaatggacctcaccggatatagaaattaaggcaaataatataattaaaaaaaatataattgtagggaaaataaattcagtagtgcgtgcgaatacctcaaagcctttaacggatacatataaactaagtcctataaagaaaaacaatataatccataaaggggtatgaggtataacagtcattgctataagttctataaattctcttaagttacggccacagccccaaataaagcccatggcatacaatatgcaaagaggtaatcctagaggttttcctagtatatttgtaaatatttcaacgagacctttagttggaaatgctttttgaagttctaaatagctccataatataaaaagacctattagtagagctaggagtactacaatccatgcattttgttcagcttcaatacctaaagcaaaaataggtgtacttcctacttcaaatacaaatattaaagtaaagagttgatgcttgcttaaacgtatcataatgtaaccctctttgtgtggtgtaaaattttaatattgagtatattataaccagtaaattttaaaattattatttattaggagtttagagtttttaaaagaaattttggcataattttagaagggcaatttaagtatgcccttctttttttagtagtttaaagaaccaaaggttataagttcttgaaataaaaaaagttataaaaagagtaatccaggtttcgtaccaagtccaatgtacgtatttaagtatgtttgtatatctttcaacaaatacttcagcaattgttatgtaggtgcaaaagtagaagtagtacataaacttttgaaagcggcttttcttttctggatagttggttataaaaagtgcacaaattgatggatatataaaatattcaaatgagaaacttgttttatttgcattgggaaaaaacctaacggggtaaactattaatcctaattgtgatacgactaaacctgatacccaggttatacttagcttaaataaaaaagctacttgagcttcgcaaagtttatttcttggaataaatttaaatagtagaattatagttatgatccaacccattaagataagtatataatctatattcataaaattaactccctattatgtaagattcagtatatacaaacgcatttaaatacttttaataggttagctaattattttttaattatacaaagatatagtaagattaagtattaacatattatatttattgttgtaacattattgtcacataaaaagagtaatatattaacgtagtaattgttttaaataaaaatcagccctttaggttttctttaggctgatttttttagttaacaaagtatataaaatttaatatgtaaaaattggcttaagtaacatgagaattttagcatagataatttagaaatgttggcgctgttaatgggctatttttttttgttccaagcagcataacctaaacgttttaatgataattgccgcataatttcaagccatgatttttcatcgccattatggaattgtgaaaaaatggataataagtgttcgcgctgtatgttgctgatttctttttctaacctttcaccttcatttgttaaaaaaatttctttgatcctgcgatcataatcagattctttactaaaaatcaagcctttattaattagtatgtgcatcggtttatgcagcgcttgcttacttatttctaacaactttaacagttcatttacactaagtcctggaaatctagctacaaaaaataaaatacggtgatgtatacgctgtattccatactttttaataatcaaatctggttcttctgtaaatgttttatatgcaaaagaaaaaagcactaatgcctcattcagttgctgttctttttctttattcatagtaaaattcctgccttctcttttttaaataacgcaccatatgataaaaatttagtttatcggtatctttttatattacaagtttacatcctaaaaagtcaatgtacttgactaaaaatgggacttgttatatcataataattaggtcaacttagttgacctaattaaggtggaggtgacaattttgaagagtgaatacacaattggaagatatttgttagaccgtttatcagagttgggtattcggcatatctttggtgtacctggagattacaatctatcctttttagactatataatggagtacaaagggatagattgggttggaaattgcaatgaattgaatgctgggtatgctgctgatggatatgcaagaataaatggaattggagccatacttacaacatttggtgttggagaattaagtgccattaacgcaattgctggggcatacgctgagcaagttccagttgttaaaattacaggtatccccacagcaaaagttagggacaatggattatatgtacaccacacattaggtgacggaaggtttgatcacttttttgaaatgtttagagaagtaacagttgctgaggcattactaagcgaagaaaatgcagcacaagaaattgatcgtgttcttatttcatgctggagacaaaaacgtcctgttcttataaatttaccgattgatgtatatgataaaccaattaacaaaccattaaagccattactcgattatactatttcaagtaacaaagaggctgcatgtgaatttgttacagaaatagtacctataataaatagggcaaaaaagcctgttattcttgcagattatggagtatatcgttaccaagttcaacatgtgcttaaaaacttggccgaaaaaaccggatttcctgtggctacactaagtatgggaaaaggtgttttcaatgaagcacaccctcaatttattggtgtttataatggtgatgtaagttctccttatttaaggcagcgagttgatgaagcagactgcattattagcgttggtgtaaaattgacggattcaaccacagggggattttctcatggattttctaaaaggaatgtaattcacattgatcctttttcaataaaggcaaaaggtaaaaaatatgcacctattacgatgaaagatgctttaacagaattaacaagtaaaattgagcatagaaactttgaggatttagatataaagccttacaaatcagataatcaaaagtattttgcaaaagagaagccaattacacaaaaacgtttttttgagcgtattgctcactttataaaagaaaaagatgtattattagcagaacagggtacatgcttttttggtgcgtcaaccatacaactacccaaagatgcaacttttattggtcaacctttatggggatctattggatacacacttcctgctttattaggttcacaattagctgatcaaaaaaggcgtaatattcttttaattggggatggtgcatttcaaatgacagcacaagaaatttcaacaatgcttcgtttacaaatcaaacctattatttttttaattaataacgatggttatacaattgaacgtgctattcatggtagagaacaagtatataacaatattcaaatgtggcgatatcataatgttccaaaggttttaggtcctaaagaatgcagcttaacctttaaagtacaaagtgaaactgaacttgaaaaggctcttttagtggcagataaggattgtgaacatttgatttttatagaagttgttatggatcgttatgataaacccgagcctttagaacgtctttcgaaacgttttgcaaatcaaaataattagttcaaaatatagcattttaaatagtaatcttaagcgtgcattatagaattgaaaataaaaattcagaatattcttactgaatctatctatagcctattatattttttaattaaactacgattatctatattagtagttaaatggaatttatggaggcgaaagtatgggtataaagtcagtaagtccaataaaagcatgtaataaggctttttattctaaggatgaaaagaattcaaaagatagcttctataacaaactaaagaaaactataaatactaatgaagatgaaaatatattggaggagataaatagcgagcctactgaggataaggaagaagatcttttgttatatcgggttttaaaaaaggatggttttaagcttaaaggccattcatttagctgggtaagagaaaattgtaatttagtaatctttcctcctattacagctccaggacacttaagaaaacaatttaaagactatattagtactttgaatttaaaagataaagaaaaaaatgatattggcttttcaatagttgcacagtatgcactctatattaaagaaaatcctaaggaaactatgaaagcctatagtaatgaggctatgagtaaattgattttaaatctactggagtataatgaaaaatacaaaaaaaggactgataaactttctattataagatatgaaaatacaaggcttgtattaaataggcttcttgattatattaatactaagcattagggttagaatttaatattaaccctaatacataatattagcataatcaagaagcttttatatttattaaaaaaggaacaaggtaagtcccaaaataaagtataaataaaattaatttactaataatatttttatactaacattttggaggaagcatttatgatggataaattcctggatatcttattgggtaagcctttggcaaatgagcaaggttctcatgaaaagtttaatattccttttggattggccgtaatggctagcgatgctatttcatcagtggcttatgctgcagaagaaattttaatagtattaatagttgtgttagggcttcaagcatatacttggcttagcatagtggcattaatgataattggactgcttgccattttaacggtatcttatctacaaataataagggcttatcctcaaggtggaggtgcgtatatagttgcaaaagaaaatataggtacagtaccgggacttgtggcaggagcagctcttttaattgattatattttaacggttgctgttagtgctagtgcaggtggagctgctattttgtctgcatttccaggattattaaattacaaagtacttatagttatagtatttattgtggttctaacaattttaaatttaagaggagtaagtgagtcttcaaagatttttagcttacctacttacatatttgtattcggtatgatgtttatgatagtttttggaatatttaagtatgcattttggggaggagctgcaaatcaggttaataaagttgtcttaaagcaaacagctgatgttagcatttttctgatattgagggccttttcccaaggatgttctgctttaactggacttgaagccgtaagtaattctgtgccaaatttcaaggaaccaagtcaaagaaatgctaaaatagtaatgatactactgtcttctataatactatttatatttggaggttcatctattttagctaatctttaccgtgcagttccgggagagaatgtcacagtactcgctcaaattgcagaaggagtttttggaagaaactttatgttctatttgattcaggtttcaacggctataatacttttaatggcttgcaatacagcttttactggatttcctatgcttatgtatgtcgtagcaagggatggatttgtaccaaggcaatttactcataggggaaaaagactaagcttttccataggtattgtgtccttatctgttattgcaggaatattagttatagtatttaaagcagttactcataatcttttgccactttactctgtgggagtatttatgtcctttacacttgctcaaacaggtatggtaattcattggagacagggtaaagaaagaaattggcgtataagagctttaataaatggatttggagctgttgtaacaactataacaacagggataatagcttatgaaaaatttgaagcaggagcatggatagtaataattttaatacctattttagtttttatcatgcttgcaattaaaagacattacaacattgtggcagagcagcttcgtgcacatctaaaagattataaggcggcggatttacaaaaaaaattcacacatcttgcagttgttcccattgctagcttaaataaagcttctttgagtgcacttcaatatgcaaaaagtgtaactgataacgtgattgcgttaaacatatccataagcaaagagcaaatggaaaagttaaaggcatcctggagtgagcttgatacggatatagttttggtaagcaaatattcgccgtatagacatatagttacgccacttcttcagtcaatagatgatattgcatctagagcatctgatgacgagaagataacagtagttcttccgcaatttataactcataagtggtggggaaatttacttcacaacaatactggaatctttcttagagagagtattcttagaaataaaaacgtaattgtatcaacgtatccctatcatttggatgatgatgaatgataaaaaaataggaccttttggtcctatttttttatataaacttatataattctaagtgtttttggaaagggataaaataaagtcatcgatcattatgcgaaagctgtcttctgaatcaactttattttgaaaatatccaagagaacttaaggatacatagccatgtagcaaacttcttaaggctctgcttttatgtattaagtctacgtcattttttatataaaagcttaaaacttgaagaatgatattattagtttcctttgccatacgattcacttcttcgttttctgtggttttagtacttaaaaatagtctgtaagcagtcttattttccatagcaaagtccttatatgtataggcaaaaattttcacagcagcttctccgctttttccaactaggtcctgcattaatttaaaattcaatgaatttaataaatatgttgtcatgcttattttgagatcactcatattagaaaagtgattatataaagatggagattttatatccaatttttctgcaagtttttgaaaggtaaccttatcaagaccaatttcgtcagctaacgaaaaggcgatttggatgattttctctttggttaaattccgttttttcactgctgtatcactccctataatcttataaaaatatcttaacatgttaagagtttttttacaaactatattttatagtttacaaactacattgtatagtttatactatagcttatagaaagaaggactgaatttatgaaaatgtggaaaaaaaatttgatagtttgttggtttggaatgtttataaccagtataggaatgagtcaaattgccccagtactacctctttacataagacatcttggggttaatagctcatccttagttgaagagttttcaggtattgcttttgggattacctttatagtatcagctattttttctcctatttgggggcaagctgctgataaatttggtaggaagcctatgcttcttagagcaagttttggtatgggaataattatatttagtatgggttttgtatcaaatgtatatgtgcttatagtattgagattgcttcagggtgttataactggttacagcacagcttgcactacgctaattgcaacacaaacggataaagaacatgctggatgggcactcggcacactttcaactgctggtattgcaggatcacttcttggaccaactattggtggttttgtagaagaagcctttggtacacaaaatgtatttttcataacaggtgcactgcttataattgtatttattgctacaatgctgtttgtgaaggaagattttgtacgtgaaaataaaaaggttgatagtatgaagaaagtatggaatagcgttcctgaaaaaagtcttactataactattcttgtaacgttttttatattaaccttagcattatactcaatagaaccaattatgacagagtatgtttctaagctatcaaggaatactagtcatgttgcttttatagcagggttggttttttcagcttcgggacttgctaacatagttgcagcaccaaggcttggaaaaatttctgataaaattggacctcataagattatgcttggtgccctcatagttgcaggtatagtatttataccgcaagcttttgttaaaaatccatggcagttaatgttttttagatttttattaggacttgcatcaggaggattaactccatcagttaatatattagtaaagaaaatcacacctacggctattacaggaagaatttttggacttagtatgtcagcaggataccttggtgtatttggaggttcagttttaggagggcaggtttcagcttatttaggaattagatatgtattttttattaccagttcactgctgcttataaatgcagtgtgggtttattttaaagtgtataaaaaacttaatttaaaagaaatagtttaatataaaggagataacaatatggaaaatttagaaatagaaaaaacggcccttgtggttatagatttgcaaaaaggcattgtagctggagagcatgcgccttatacaggaaaagaagttgtagaaaaagcaagtaaattagttaaagcatttacagataaaggggcttttgtagttcttgtaaaagtctcaactattgatggaaaggacatgcttaagcctaagttggattcggaaattaatcaaattaagcgcccagaaggatgggatagctatgtaccagaaatatccaatataaaaaatacttatgctattacaaaaaggcaatggggagcattttacggtactgatttagatttacagttaaggcgtcgaggaatagatactatggtgctatgcggtatttctacaggaataggtgttgatactacagctagagaagcttttcagcatggatacaatcaaatttttgttgaggatgcaatgacagcaagatcaagggaagaacatgcctatgtttgtaaatatatatttccaaggctaggaaggatcagaaatactgaagaaatattagaacaattataatattgaaacaaaatatgatttttaattataggttgacaaccccacagttcttgggataacattattttataatatacttatataatgttcctaggaggagttttaatgattgataatgctagggaaatagcagagttactaaaagttctagctaatgaaaatagattaatgattgtttgtcatcttattgatgcacctatgacagtaactgaacttcatgaaaaaataaataccttgacacaatcagcactgtctcagcatttagctttattgagagcacatggaatacttagctcagagaaaaggggactttctattacctattcaataaaggataataggataacaaatgtaattaaggttttaaaagaaaattattgtgatataaagtaaagcatgcaaaacttataaagtaattgcatgcttttgcattttatattgacaaaagtatattctagatttatattagtatataagaagatactaatataaattggaggaagtttatgtttaatatttttaaaaataatgaaattggttctataagtgtacatgatttatatgagagaataggaaaaattaatttaatagacattagggaagattacgagtataaagacggtcatataccttcagctaagaatgtaccaatggggataattttaaaagaaccagaaaaatatattgataagtcaaaagaatactacatagtttgtaagtcaggagcaagaagcataaaaacttgcaaacaattaataagtaaaggatacaatgtagttaatatttcagggggtacatcagcgtatataagaccactagagagataattaacatgtgatagtatgaaataaaatagaaaatattttaaaggataaatggaggaatcaaaatgaaaaaggtaattgaatttcataaggaaggttataattgtgcagaatctattgtaaaggcaataaatgaggataaaggcttaaatattccagtttctatagcaactccttttggagcaggaatggcggttggaactacttgtggtgctattacaggaacgcttatggcaattggagcagtaaagggaagagaatcaggaaaggctgcaaatgaaactagagagttgagtagaaatttaattaataaaattaaggaaaaatatggaacatgccaatgcgtagagttaaagaaaaagggaataagctgtgatgaaataatagaattcagctatgatattttaaaagaatctatataatgaataacatacaagttatccaaaacattgcatgtcttttttattgaaatatataaatataaactagctttaagggaaaaatagtattgttaagctagagtataaggtagcttaaagttaagctttctgtagtatctcgatcattggtgtattataatataaaaggaggtagtttatatggtttctactttaggcagtgatacttttacttcaataagtgctcatgacttgcatggaaaattgggaaatattcatttaatagatgtaagagaaaatgatgattttaaagaagggcatataccaacttccagaaatataccaatggatatacttttaaaagaaccagaaaagtatattaataaaacagacgaatattatatagtttgtcaagcaggagtaaaaagcgaaaagacctgtaaagaattgtggagtaaaggatacaaggtaattaatattaaagatggtacagattcgtacaagcaaccacttgaaagataaaaaacaagagtaaaatgtaaaatagtctatgtgcttcatgaagctaatataatgaagcaaagactattttacattctttattttttaaaatgattttatatagatatccttaagttcacttataagtggatacctaggattagctgttgtacattggtcatcaaaagcaagctctgacattttatctagcgtattataaaaatcttttttatttattccagcggcacttatattttgtggaatactcaaatctatctttaactttgaaatagcttctattaaggctgttaccttttcggtatcgctagtaccctttaaattcaaatactctgcaatttcagcatattttctcttagcattaggagatttatattgagggaatgctgtttgctttgttggacagtctgtagcgttatatttaataacttcttctattaatacagcacaagcaattccatgtggaacgtgatgcattgccccaagtttatgagccattgaatggcatacacctaagaaagcatttgcaaatgccatccccgcaatattagaggcatgtgccattttttctcttgcttcaatgtcgttagtcccatttttataggctctaggcaaatatttaaatatcatttttattgctcttaaggctaattcatcagtataatccgtagccataaccgaaacatatgcttctatagcatgaactaatgcatctattccagttgctgctgttaattttctaggcatatttaacattaattcagtatctattattgccatgtttggggtcaattcataagaagttaaagggtatttcattcctgtttcatcattagttataactgcaaaaggtgttgcctctgaaccggtaccagcagttgtaggaatagctactgaaatcgcctttgtacctaatttagggaaattgcatattctctttcttatatccataaagtttatagctagattttcaatttctgcttctggatattcatataacaagtgcataacctttgctgcatccattggcgatccaccaccaatagagattatagtatcaggttcaaagttaagcatttctttagcacctttttttactgaatcaatagttggatcagatttaatatctgtaaatatactgtatttaatatctatctcatctagtacctttgttattttattaacatatccaagtttaaaaagatctttatctgttactataaaggctcttttcttattcatatcttttaattcttttaatgcaaatctaagacatccatatttaaaatatattttttgtggcactttaaaccaaagcatattttcccttctttcagcaacacttttaatatttaataaatgtttaggctctacattttgcgatacagagtttcctccccaagtgccgcatccaagagtaaatgatggtgctatcgcaaaattgtataaatctccgcttgctccctgtgaagaaggcatgttaataaatgtccttgaagttttcattgctaatccaaattctttaactttatccttattgttttgtgaatctatatataaagatgacgtgtgtccacttccacctaattctattagcctttgtgccttttttagagcttcatcaaaatccttaactttatacattgcaagtactggtgatagtttttcatgtgagaacagctcgcttttttcaacagattgtacttcgcctataagtatctttgtagtttgaggaacttcaattcctgccattttagcaattatataagcagattttccaactatgtcagcattaatagctccatttttaaacatagtttcttttattttagctatttcattttgattgagtatatatgatcctcgttttacaaattcctctttaactttttcgtatattgaattcataactaatattgattgttcagaagcgcatattactccattgtcataagtctttgataaaattatggagcttactgccatatctatatctgcactctcatctattattgctggtgtatttcctgctccaacaccaattgcaggttttccagatgaataggccgctttaaccattgaaggacctcctgttgctaatattatatcagcttcactcatcaaatcttgagaaagttctattgatggctcatctatccagcctattatatttttaggtgctcctgctttaacagctgcatctaaaattaattttgctgcagcaattgtagatttttttgcacgtggatgtggtgaaaagaatattgcgtttcttgtttttaaagaaattaatgatttgaaaattgctgtggaagttggattagtagtaggaactatggctgcaacaattccaattggttcagcaacctttgttatgcctaaagaatcgtcatggtctattatgccacaagttttttcatttttatatttattgtatatatattctgctgcaaaatgattttttataattttatcttctacaagacctattcctgtttcttctactgctaatttagctaagtttattctttctttagctgcggctatggcacattgtttaaaaattttatcaacttgctcttgagtataggttgcaaacttcttttgcgcttctctcaattcatttagcttttgttttagttctttttgatttgtaactttcatttatatacactcctttataaaatttattattagtttgatatttaacaaactattgcaaataaaacttattgtattatataacacactttgatgccttataaattatagagtgtggtttccttacattatttacttctaatgtgataaaccgttgatatgtacatatttaacgcttgtatttctatagtaaaattatgcagtcattttattttctataatattattatataacagtaattaaagattgtcaaacatttaacaataattaatgattataactatttttattgccaaatactagttataagtgggtgtattacgtattattagaataaagtaaaatcgataagtgttgagtttgtttttttattcactaaatgtattttttacctatagcaaaaggcctcctatgatttttgttttatcatagaaagccttttgttttttaagctatagatttttctcacacttttttattcatcaacctttttgcaaagtgccttacagctctgatccatattcagttgatttttatattctatattttcaatattgcagttagggcctattgtaatattgtttcctctcactatttttgcgtccgtgtgctcgagataaatattatcgccttcgattatgctggttaccaatcttccgcgggtaaagaaaaggttcatcatctcatgtataaaatgtccagaacctaattttactgttatattctctccacctatatcctttactctacattttccatacatatatatttcaatatcaccagcatttaataatccagctatctcgaagcctcctcttgcatggaaatgttctgcttcacaatcctcacctatagaaactgaaccggatatatctatactgtcagtgtgaacatttccttcaatatcacttgagccacttattttgatttttttagcagtaacatttccaaaggtacgggaagagccgcttacaattaaatctccagaatttaaatcaccgtgtactttagttgttcctgaaattttaactatctctttggcagtaatatttccattagcagtagaagagcctgaacacatataactgttgcaatttacattaccatttattttagcagagccactaatttttacttcgtcatagtttcctccacctatacttccgcttccagatacttttacgtctgataatttttcttccattttaaaatctcctttattttatagtgataattttgattttaattcttctaaacattctctagcgtttacttttagaacaagagatgctgtattttcaatatatatctcatttggtataagcataagaaaacatatagctattcctagttttcttattaatactacgtcacaatatcggtcatcaaaatttttgtaattttcttcaagagtatgaagtatgagtttaccttcttctaaacttgttttcccggattttaggaacctatctaatatagtcatgaaaagtagttcgttaaatgaaaagttatttgaattttcatgaatgctagtatataagttcattatagtttgcgaaacaatgttttgttccagcatttcttttttttctaaagaaagctctgaaagatttggggaaaatatattggcaagctcatctaatgatacatcccccttaaagctcttaattttttcaattctatctaagatttcatttttagggaaaaaggtctcctgcccagtaaagctggatttctttatgaaccattcctcaggtataagtttctttctcttccatctatacagctgaccataagaaatatgagttatctcaagaagttcttttttagaaattaaattagtttcatccatatagctattcctccagttattctcttcatgaatacaatataacataacattgttacgtttgcaataggaaagttttatttcacacaaaaaacagctaaaatataaatttagcttgtttcgaactatagataaggagtgttaatatttatatgaaaatatacattatcttaaaattgatgttataatatagagcatatattaactataatccactacataagtgtaatttattatataaagataatattggaggaaaaagattgtgtttattttattattaaaatacataaaacccgttgaggaagttgataaagaattagaaaatcatataaaatatttgaataaatattattcattggggaaatttatttgttcaggaagaagaaatccaagaataggtggtgtaattctttgcaaggctgaaagccaaaaggaggtcaaagaaatacttgaaaaagatcctttttatttaaaaaatattgctgaatacgaaataatagatttttcacctacaaaatatgcagaagggtttgaaaaatttataaatatatgatacttataaaggcaaatttaaaagcaactaaaatataaaattgaactgacccctgtcaagtagacaggggtcagttcaattttaactaaagcttatcgaatttcttttcccatagcctttttaagtgaaatttttcttcgtctatttcttcttgtgttctaatgcccatttttcgaagaagtggcaaaggaggacaccaaccatgaattgcatgttggagtaaaaagcctgaaacaatcccagcaaatttaaaatatccagaattcttttttataaggcctgcagcgatactcaataatataatagaagctgcattggtctctagtattctttctatatcccattctgcatcaagttcatggattttagataatatttcttctttgctcattttgttgtaggcctcaatatttgagcaaagttttttctgaattttaaggttaatttcattactagtattcatagctactcttttggaagtaggaggacaaattgtatggagcataattatatacacctcattttatactgattttgggtttagtttgctctattataaaaaatttattacataaaaatgctctcttttcgcttggaaaagagagcattcttcattgtgttaagatttaaagtctttagaacccctaattttttttacataataaaatttacccaccttaaaaattttaccatggtgtcattggtgaaacagatagtcctacgttattacctaagaaattaactcctaagaataatagagttaaagcaagtactgaaaaagctaatttgtgtttttttaataacatagattgatcatcctttcttgtataaaatttttactaaaatcatatatctctttaatagagtgaatatcattggtggcaaagtaaaaatctaataatttaaacataagtttagaatttaaatttttgtccctactagaatttgaaaaaaattcatcttttatagtctgaactttttcaggaacatttaaggttttatatatatctagcaattcaccatatatatcatttactaaatagtaatgagtatttcgcttagcataatttaatgattttaaacaatataactcagcatcctttgtataacctaattttttcaagatcctgctcatctcaaggtatgtagaaggtagaagagttgaactttcattcaaattgtttatattttcaagtataattcttaaatttgattctgccttttcaaaatttgaattttctacataaatgtcagaagaattaaccaatataaaaagatatttttcataatcacttttgtctatactttctagtagtttattatatatatctaaacttttttgatattccttcatccattgataacaaatagccttttgaataagcacttcatagtatttattctgatcaatattttttattatagattcgacttcattaagccttttaagggctaaatcatatttttttaattgaccataacacaaggaactgttaaaaaggaagatacatctgtactcctcatccatatttttaaactgctttaatgcaaattcacagcagtttatatcatcctgatatctcaacatgtaataataggtcatggacaattttcttaagatatgtactatattatcgctgtaaatatttatatctattagtgcctttgctttttcgtaatataaggatgcattataaaaatcatttgtactagaaaagtagtcaccagcaagctcaaaaatagtaatttttttgtctctaaaatcccaagtgaccaagaaatcttctacttcccttagcttatttataaatacattatccttataaatagtcaaatctctcaaatcgtctatatatttatcaagcactttaattgcttgcgatttctcatcttccatcaaatagtttatatcttcatcaacttgtacattttttttatcacaaattttttttaagttcttaagcattatttcggcagcactcctagttaagtttgccttattatgttctatctggcttataaggtttctagttatctcatttcctgccagatcttcttgacttaggccgtatttatctcttatgtttttcaatttattagctaccgacagtattttgtaacttaccatagaaattctccttaacgtaaaaaagttttgttaccttgattatagcaccaaaataggaaaagtactacaggtaaaactataaaaaagtacaactttttcttgtaaaataccttgtaaaaatacataaatcgtctgatacctaaaacaggcatgtgaattttttatcacataatgtaataattacttacttttcgtaatttaaaaaatgaaaaaattcagtatactcctagaaattaaattttataaagtataattaaatatttatttttgcataaactacagtttatataagcatatatgttagtgcagggtatgttgattgatataattgttggagctgctgctgttttaatatgttggagatttggagaatggagtaaatggagcgaatactattctactattttattttttatactaggagatatggcatataatttttcgttttataatcatccattatggatgtatggtggaaaccttattaatcatacttttacagatatatttattgctattaccttgtttccgacaactataattttatataatacattctatccaaataaagtcggtaagaaaataatttacgtattattatgttcgggtatatactcactaatagaattcatattatatgtttttaatagtttttttataaaaatggttggaaggtagtttattcttttatttttgacattgtaatgtttacgattttaaggatccactataaagaacctcttttagcatgggttatatctatgatatgtgcagtagtgttgatgataaaatttaatattagtattcttgagatgaaataatttaaaacagagtaggtgtaataatgaattataacactatatacagtatggataaagtatttaaagaatttaataaagtaactttgaagctttataatttatggtcaaatcatatgatatatacctggcgctggtggcttcaagtgctaatagcaatacttccatggatattgtgggtaatcataagaaaaaaagaaagtgcaggaagattgctttatgccggtttttttactatgcttatagcaacatatacggatgtacttggaactacgctgggtttatgggaatacccagtaaagcttcttccaatatttccaccaatggcaccatgggattctacagtgatgccagttactacaatgatttttcttcagtataaaactgaaataaatccttttttgaaagcctttatttattctttttttggtgcgtatgtacttgaacctttagctgttatattaaagttatataaaccttttgggtggaagcatatatattcgttcatagtttttttcgttatttatattttcacaaactatatatttatgcgggataatttcaaaaaaatataaagttaaatactgcgttgtctgtattaacaaaataagggcgaaagttcccctttatttaaaatgaaaatgttcataattcatatctttgattttaaagttcactttttcaaaatctcgtcgaagtttttctctcattggctttggaccacaaaagaatactgaatactcaagatttttatctatatgtttttctaagtcttcaagtcctaaaaatccatttttggagctatcaatcgagtgtatatttagattgctatttttattaatagaattgagttcattgatataagcaccttcattttcattgttatatgtgtaaaataaatccacagtgtagtcagaaggaagttcagcctgccaaaagcttctaaaaggagttatgcctattccgccggcaatccatatttgatgttttaggccattttcataattgaattttccgtgaggaccgcttacggataaagtatcgcctacctttaaattttcttttagagctttggtgtggtcacctagaacctttatggaaaattgaatctcgttagatttattggaattactcatagtaaaaggatgtgaggggaaaaagctctttttttcaggaatttttataaatgcaaattgtcctgctttatatttgagttcatttttaagggaagttcctgtaatttcaaaggtatccttcgcaatttcattaatacttgtaactttatatttgtgcttaaaggaaacaaattcatatataaatatactataaataattgacaaaacaccaattaagttaaataggttcatccataaactaaaggcacttagggaaaaaactttgtattcagaggataaatagtaatgaagaactcctaaaatatatggtactatcattatggtgtggaattttttccaattttcatattctaatttgtaaagcacaagaaaaattatcacaagaccagtgaaaaggtatagactgaaagtacctaattgctttccggagaaaaacatgccggcgccggagggtttaactcctttaggaagggatttaaagttagtaggacgctttccagaaaaacctcccatctttagggtgaagttatgtgcccaaatgagaaatacaataagaatacttaaatatttgtggtatatgtaggagatatcaagtccattaaaaaaatcatcaacatagtgatgtctagtagcaataaagtttatccaagtaagagcaattagtgcgatagaggatataaactgcgagtaccgtctatatagggataatgatttttctggtgtttcaaagagccagaatatataggttaaaagaaaggttaccaaaattaaaattaatccttgatattttttcataattattctccccactttatagtattagtcttatttagatatttactaaagggaggttttctatgtatgtatttttaatgaagaacggacaaatttaaataacttgtccgttctcaaaatatattattgagttactagttgtttttcaaagatatctaatatttgctgctcaaaatccttttcagagtttctaattatggccctataattatcaaattttaagctttcggtgtggaaattttcaaagcattctgatattttatttaatatgagagggatatttttttcttcatcctcaaatttaaaggaagcatcaattggaacatccttaaaatattttgcagagccctttttgtctgttataacgcagcagccacaaatagcagcttcacgtggtagtctgtccttgccggggtggttaccaaaatctatataaacttttgacttttttagtaaatcaattacttcctgtctactcatatttataattggtctccaattaatagatttatgagctttcataagcttttcagtaaactctaatcctttttttggattgtatactacaatgttttctcgattaaaaagatcattatctaaattgttttctagaaaatctcgatttaagtaatctgatagatagtatacctttggaatgtttttttcttttaaagtttcagtaatgtactcgcattgagctagatgaattatattattatcttcaaagttgaaatacttaaaatcaccaagtagagctttgattttttcattatctttatttttttctaaaatctttatggaatcataataattatctatacttaaccaccatatggcttttcttattttttcatacctatatagaaacatggtcagtacttcaggaactattattaagtttttagaatcatcttcaatagtgtttacatattgtatgttatattttttatattcatctggtgttgggttttcagtgtcttctccaacatagaacatatatgccttaaagcctaagctattaagcttgtacaccaattggtggagtagttcaataccgcctgtggtatactttgatacacaaacaacaaatatctttgaatctctaaacatttgtatcatataatctcctccttatataaatttaaatgctaaaaagtagctaaaataaaggttattttaactacttttatagaatgaatttaatttaaaatttcagttcttgctttaagctttagtacttcttcagcagcccttttgtagccaccgctttctctgaaggaattattgatttttcttatgttctccatgtaattttggtttgtcattacctcatatacagaatttcttagaagctctggtgtaagagtatctatatcaagcttaatgcaggcgcctaaatcagcggttcttgatgccatataaggctggtctgcacctaaaggaatagctacaaaaggaacgctattaaacagtaaatcgttagtactgttcattcctgaatgcgttacagctgcatttgcatattttaaaatttctgtttgagatatataatttctaactacaaagtttttaggtatatcaaattgtgataagtcaactttatatgcagtcataacgactactacatcttcgtttttaaaggcattaaagaatgtctcataaagtttaatatcaaaattgctgtatacagtacctagtgaaatgtatattacctttttatccttaatttcttcataagggaagtttgataaatcctcttttctatcgtatataggcggacctataaatttaaagctgtcatcataatattgaatatttggaataaaatattttgatgtgtatgcgaagtttacatctcccttattaaaaaatagcttctttatttcaggaagttctatatcgtatttttctttaagcccatatttaagcttcatgtatttttccattataggagtgtctttcatagattcttcggtaatgccttcaaggctttttggcataatttcatctggagtagcaaaaattgcaaaagatgaaaatgatggcagctttaatatttgtgctagtaagcttccaaaaggacatgcagcagcataaccaatgtagtcaaatttagtaccatttgttttatctagaacagattcaatagctttttcacaaatatcaagtgatttttcaattatggcaattaaagtttccttggtcatatttgaggcactaaagtgatgttttctatttgagggatccatggcactaccataatctttaaagatagcacctgtcttttctattctttctctaaattcttcagtacaaaaataggttacttcttgtccacgtttaactaattcgcttataatacctagtgttggattcacatgtccataagcggggatacctaaaaataatatttttcccatgttataatcacatccttatcaagtttatgtaatttatagtgtttactttagtattttggtttataccattctgttctagaaatgttcatattctatgtttttaccacatcttgcttttaaaatatatataaattataatttttaataaatcaatattcaatcactaatatagaaaaaagtgttgtttaatcaacagattatatacattttgttgtttattttggaggaaattcaatgaagaatagaatagaagatagaagaataaagtacacaaagatggttataaaacaaagtttaattaccctcttaaaaaataaacctataaacaaggtgacggttacagagatatgtaatttggcagatataaataggagtaccttttatactcattattccaatccatacgatttattggattcaatagaggaagaactatttgaggaagtaaaatcctcgcttagggattcagaaggagagacaaaaattgaaaacactgtaaatgaaatttttaaggccattgcaaaaaataaggaactttttaaaattttttttagttcccatagagattatggttttttaataaagttttttggagctgtatataataattctattgataattttaaatcagcctttaagtctaataacgatgcacagttggaatatctgtacaactatatattaactggtaatgcgtctatcagctataaatggattaaaaatggattaaaggaaagcccagaagaaatggcttcccttgtcaatagattaatagtacataccatgtcatttataaaatagaactatacttggagttctagatcatcatagctggcataggagttattaaagatagtttttgcagcaagttctgctttttttctatcgtctagagttagatatttagctgcatcaaagtgaataagcattaatttttttgcaccagcttcttttgcaatcttagacgctaattctgggtttaaatgcacagaagcgtcatcagtgcctaagggcttcatgctacattcagatattaataaatctgcatttttagctaaagtaattgcattaaaacaatagctagtatccgtgcagtaggatattgttttactatcaatctcaagtcttataccaagaacatatgagctgtgaactaaaggtagaaaggttgctttaaatgggagaaaattaagcttattacaagcctctattatttcagttttaaagggcagcttctttataggaactgtaaatggaacgtttacaaattgattaattaatttagttccgccttttggaactataatgtataatccttttgaaaatttattcaagggtaaagtatgtagacctgaaatatgatccaagtgaaagtgacttaaaaaaagataaacaggcttatcagaagaaatgcaatttctcaattttgatataccatttcctgcatctaaaattatataataattcctatgttcaattagaactgatggggtgttccctgtatttgaatcaaaccaaccatttgtacctaagaaagttatctttaacatttaatgccctccctttgattattagttaatatatttattatactaataaggtaaaattatacaagtgggcaatttatcaaactcttgttatatttcttaggaaaatatttaatgaagaaaaatttgagataaaccggaagtaagaaaataaaacatgcttatattcagtaaatggaagctaaaaagtcgaatataaaagaaaaacgtagaaaaaaatagcattatagtatataatatgtatatgtttaaatttgaagatgatacgtggttaacaagagattatatggtcaaaaacgttattgtaatcaaagcttaaacttaaattttaaaagggagagtgtattatgatttcagtacatggtatagattacataaagggtatgtgtgagcttcaagtagatgaagtaccaggaggtgttatttacttgataagtgatggtaacgtgtttacttggagaaaagcatctatggattttaatttggatatatttcaagttggagaaaaattaaatgctgaaagtgtaaatgttaaggctctgagagaaaagaaaagatttgtagagaatgttccgcgttcattgtatggaattagattaaaggttatagccgatcctatattagatgatgatggcgaagttgttggggtgttttctatggtattcccagttctacatccaatgatgtcagcgttcaaagattttgctccagttttgtctgatatgttttcggatggtgtagtattatttgtaacggatttaaataaatttgtagaagtacagcactcagaaaattttgagcttcctgaactaagagcaggtgatgaatttaaaattgatactactcctgataaggttataaaaactaataaagctgtttcaattgaatacccgtcttctgtatatggcgttccagtttctgcagcttgtcatcctatagttgatgaggtaacaggaaagattgtgggaacttttgggctacttattccaaaggttgtggcatcaaagctaaaagaagtatcacaaagcttagaggatggtattacggaaatagcatcaactattgaagaactagcagcatcagcatcaaacatacatgtaaacgagcagaagctaaataatagcattgatggtataacatcattatctgaagaaataaattctgtgacaaagttcataaaagatatagcaaatcaaactaaaatgctagggttaaatgcgtctatagaggcggcaagagcgggtgagataggaaaaggttttggggttgttgcagatgaaataagaaaattatctgaagagtctaagagtacggtacctaaaattaaagagctaactgataagattatacaaaaggtgagcgagtctagtgaaatgagccaaagctcgttatcctcaagtcaggaacaggctgcagctacacaggaaattacagcaagtatagaagaaataacatctatggcagagaacttaaatgaaatagcagatagattataatataataattgttgcatgcaggaattagaagaaataaactcctgcattattttttatatatggtttaaaatttcaataaatcttttggtttcatacataagatctctaagtattagaaccttccacttttcaactataagtaaaagagtagtttcaataggacatgctggcaattcttctttcataatatagtttcctttcagatatattcacattagttacctatgtgtacttagaaaacttaaaagtactcactttaagagagctatagttctaattttttaaaaggcacattggtaaagtaatgtgccttttagtaggttaatttttacttccttcaaagctgtctacagtaaacaggcttgaaaacaattttctccaaataagaacaactagaatggttccaacacctccaagaagtgctgcaggtacagtacccaaaagtgaggctgtaatacctgattcaaattcaccaagttgattagaggtacctataaatatcatgtttacagagcttacccttcctctcatgttatcaggagtttcaagttgaactagagttgaacgaataacaacacttattacatctgatgcaccaagtacaaaaagagctaaaaaggatacaataacagattttgatattgcaaatattatagttgataatccaaaacacactactgctgtgaacattattttaccaacgtttctttttagaggctttcttgtaagtaaagctgacataagaagtgcacctacagctggagctgatcttaatactcctagtccaaaggagcctatttttaaaatgctgcttgcatagataggtagaagagctgttgctccaccaaatagtactgcaaacaaatctagtgatattgctccaagaattataggtctgcttttaatgaaggttattcccgcaaagaaggattttaaatttacaggatcaggttttctttcttccttgttcacatgaatttgaattattaatacacttgccagtattaatagtccagcggttattgagtaaataagtgaagctccaaaggaatagaggattccagcaaaacccgggcctactataactgcaaattgagaagctgaagacactagcgcggatgccttaggaaagatttttctttcaactatattaggaagtaaggcttgcattggcggaccttcaaaagaatgagctaaagctataaagaaaaccattattaagaagctttctttagtaatccagccattatagtttccaaaggctaaaagggctatgcaaattccttgtactaattggcttatggaaactatttttcttctatcatatctatctgatatatgcccaacaaacagtgataacactagcataggaagaaattgaactagtccaataaggccaaggtaaaaagctgaatgagtaagcgagtacatttgccaaccaatagcaaccgtaagcatttgatatgcaaagttactggatacccgagctgtaattagtaagcttaaggacttgttttttaatagagtcggagttttaataaagttcatagtataattcctaacctttcaaaaaataataaatgattactatagtaattttaagttaacgcgggaaaaagtcaataaaatatttgtaaggataagtgagaattattacattatttttattaatatgtattgaatggtataatatctataattgcaattaaggagtgaaattactatgggtacaatagcagaaacaaagtatggaaaactagaaggcataaaagaaaacggcataaataagtggcttggaattccgtacgcaaaaccgccagtaggtgaacttagatttaagagaacagttgaatgtgagccttggaatggggtgcgttatgcaaaaaaacatggcagcaaaccacatcaatttgcaaatacctctgaagaagtaggtatagaaagtgaagactgcctttatatgaatatttgggcaccagaaaatgcaaaaaattctcctgtatttgtatggatttatggtggagcttatgctatgggttcctgctctgaagcttattatgacgggacaaattttgcaaaagaaggtatagtttatgtagcttttaactatagacttggtgtacttggtttttatgattttacaatgtatgatgatagttttgattctaattgtggagtttcagatcaaataatggctctaaaatgggtaaaggaaaacattgaggcttttggaggagatccaaacaatattacaattgcaggtgagtcagcaggtgcggcatctgtcacaaatatgttagcagtaccaaaggcaaagggattgtttaacaaggctatagcagaaagtccattacctggttgtgttacaagccataatactgctaggttaattacagatatatatttaaagcgcttagggcttgaagccagcgaagtacataaattaaagacaatggagctagaggatataaaaaaggcagcattatatgtgatagacgacacttgtagcagctatccaggaatgtatataccagggcctgtacttgatgatttgataccaagattgccttgggaagggatagctttaggaagttcgaaaggagtaaagctcataatcggcactaatcatgatgaaggtactttatttattaataaaaataagtctatgcttccaggaggatggaaggatgtagagagaatgttaagaatgaataaatgctttgatagcttgcctaagattcataaattatacgataaattctcagaagagatgattcaaattcaagaaatcatgaaagatagaacttttttagtagattctattaaagttgctgatgcacaaagtgaaaaaaatgatacttggatgtatcgttttgattacgctcctatttctgctaagcttaatggacttggagcaacacatgcagtggaggtgtctgtagcgttaaataatactaaaggggaaggtatagcctattctttttggagggatacgccagaggatataattaaaaaattcatagaaaatatgcatatgtcatgggtaaactttgctaaaacaggagatcctaatggcaatcttgatatagagtggaaaaagtatgattctaaaagtagaactacctttgtttttgatgaagaaaataaggtagaaaataatccagcaaaggatatttatgaaacttggagagatattaaattatatactgatatatagttagaagatgagaagtattaaaatatatagtacttctcatcttttgttattttactctaaagctttctggaagtatattaatgagccaagctaaaaggcgccagcgctttgaaatatatatttttcttttcttttttaaaatagaagtatatatttcttcagcagctttatcagcagtagttgtccaaaagagcttggacttatcagcttgctttgtcatttctgtatatacccagccaggcacaacttctgtcacatatattcttttgcttgctttagttagtaaaattctcaatccccttaagtaatttgaaacaaatgcctttgatgcacagtatgcattacttctatcgctatataccaaggaggacatggaggaaattccaactatatgtccatatttttgtttcataaagtactgggaagctgtatttgccatagctgcgaaaccggatatatttgtagctatggtttcttcttcgttactccagcttagttctaggttaggtcttacaattcctgaacttataacaattaagtctaggccgcccagttcatcaataagctcttttaaaagctcaattgccatattgggtttacaaatgtctatttgctttataaatgttttggtttttatagatttttggagatttataagtcgttcttttcttcttccagtaattccaactatatagccgttttcggctagtttttttgcagtttccattcctatacctgaagtggcaccgattacaatagcttttttcattattttcaccttattctattcctttactaattttatctaataggttaataagtgtttctctttcgacatcttcatttaatgacataagaactttttcccacagctctttttcagcctcctcatgctgattacttagttcgataccatcctttgtaagttcaagtgcataggagcgtctgttttctttatttatagttcttctaactaaatttcttttttccagtctatcaactatgctggtaagagtacttccggggatatctaaatactctccaatttcttttaaagctgaattgggatatttactagctgcctttagtacacttagttcgctgctggttatgccttttggaaacattgaatctatatctccatgaagttgtcttaaacgtttatatatactgtgcataacagcatcaaatcttttatattgttcttcacttattttattcatataatcatttccttttagtattatttcgatatcgtattaattctatatggaaataatatcgctttttataaaatatgtcaagggattatttatttatataaaaaagctcctatttaggagtttactaaataggagctaaatattctaatgtgatgctaagtaagatcttaaccatttaagagctggacgttcagtaccatttgaattaactaaataagtaccactattccaagtttgaccttgcatatatccccataaagttataccttttacattaggattttgatatagaacagggaacttttgttgatatctagcaagctgagttgagtcatcgccagtcatatcaagttctgatacgtatattggtaaacctgtattagataacatatttaaaacatagttcattgttcctacagaaacgttatccatattgaaatagtgacattgaattcctattccatcaattaaacctttgcttttaagaacatttatgattttaacataattagctgctgcattaggatcgcctattatgccatattcattaattaaaagttttgaattagggaaggcttttcttgcctgctgataagaccatacaatccaatcataaccggtggaaccatctccgcctaaagcatttttgtaagaaggttgagtatgcagtggttcatttacaacatcaacaaaagctgaaccagaatatctttgacctgcggctgcaatccattttgatacttcagatttttgatcttgaggtgaaagatttgacaaccaagtaagctgctgacttccccatactaaattatgaaatttgaatggcatgtttttacttctggcgtaattataaataagatctgcgcttccccagttataattgccacgaccatattcaattgcgccccacttagttgcattttctggtgtaacttgattccaataggtatcaaagttagaaggaatacttcctgctataatatttcctacaaatttgctatgtgacatagcagctttaaaagttcctacacctgaaattgaaagggcaagacctaaagctaagactcctgtacatatttttgataattttgattttaacataataacactcctttttttatttaataattaattttaatgaccatttaaaagctttttttcaaatacatttaaggtatcgccatttgtaataacaatacgaggtaaaccatatttgttacttgtgtcggtgcttaagacgtttgatacggaaaaaccagctttataacctaaacttttaaggattgaaacactatctgcatcatatgttccataagggtatgccaagtaaagtggagctttattggttatagacttaattttggcagttgcattattgattgcagcatacttttggttatgtgttaaagtagttaaatctaagtgatttgtagtgtgattctctacatcaattccgttatagaaaacagttttaagctgacttgtagttaaatgtccataggtatcaattagatttgtgattgcaaattcggctgctttcatatggtatttccttaaaataggatatacatttgtatagaagtcttcagtacaatcatcaaaggtaagcataactggcttcttaggcataggagcctttttgtttataatattgtaatattggtcaatagaaagtgtcgtatatccattagcgtttagataatccatatgctttttgaattctgtaagactaaattgataaagattattagggtctggatttgtagaaacaacatgatatagaagaactgggacacgtacattagtttctgctttcgcagattttacagagtaaggaatagataaaagtgtcaagataagaattacagtgagtaattttttcatagtatcatcctctctaaagttttttaaatgcaaaaagtaaatgaatgtgtttacatatattataacacatatttccataaattctatattttttttgaaaaggtattcaaaagttttagttgttacttaattagaaaaatattaagtattatctttgagtttttgtatgaatacacttgttattaagtcatcttattttggggacgtacatacatataaattatgttaatattaaaaataaaaaattttgtcttgtacatttattgatagtaatggtatagttataaaattagagggatagagtaggaaaattatatcagtttaaaaattaattaaaggagaaatagtatgaaagcaaaagacgagacaaattacttagaacgattcccactgttgttatctatagcaatagcaattatctttctacttgtgcttaggggcggaattttgatttatttaattaagccagcaccatcagattatgatgtaatacttacatcagatgttttaggaattatatttgcattaattgttatgtttttattaaaaaaattatatatcataagagaaagaaagtatggaataataagaggaatttttgttggtggttttctattttgtgtatctgcgctaggaatgctaagtgtgttatcaactgttttgggtagaaagcttttaccaatatctaatatagtagtgtttattgcagctatggtagcagttggtatagctgaggaatttattttcaggggaattatacttaatctttttattgataagtttggcagaaccaaaaaaggagtattaggtgcaataattatatcaagtataatgtttggatgtgcacatatgaataatgtgttttcaggcatttcccttaagggtgcatttatacaagctatgggaactataatgcttggagcattgcttgcagctgtttatttaaggacaagaaacatttgggtagttgccattcttcatgcttttatggattttagctctcttataggagctgggctctttggtgtaagttcctttactagtcaagtaaatcagtatagctatgttaaacttataagtgttgctatatatttaatacctgtagtagttttgcttaggaaagaaaaaatgaaagaaatattagagtcttagttatgaaatatagctgtgtacaatattaatttgttgtacacagctatatttttatataattgtaactaccctgacttactataatatgaagatatttttatataaatcagtaatagtatactgatttatatggatgataataaaatatagatgtatatatatataaaattaaataaaaagttttacaataactattgaccatgttaacgttgataggtataatgtgtaatataaggcttaattattgataacagaaatgttaacgttaacataaaaatcttaagaaaagaggttttatttatgaaaaaaatagtatgcttagtcgcatcagcggcactttcgctttcattattttcactacctcagctagcaagtagtgttaatgcagctagtgcacctgtaactatacaggtagctagtacaggaactagtgatgattcagatgttttaaagtcagctatagctaaggctaatcctggagacacaattttacttactagctcaacttacaaattgaaatcacctattcttttaaataaggatggtggtactggaaataccataaaattaaaaggggcaggttcaaacagagttaggcttgatttttcaggtgaagcagatggagatagttcttacggaattaacataaaaaatgcttattgggaattacagaacttagatgtctacagtgctggtgataacggcataataatgaaaggagctgcgtctaatcataacattattacaaattgtgaaactgagaataatgatgatgcaggtcttcagattacaggaggagcacatgataatacagttcaaggctgtgattcctttaataattatgacataaaaacaaagggatcaaatgcagatggttttgcatgtaagcttggtgctggagcaggaaataagtttataagctgtaattcttatggtaatgcagacgatggttgggatttacttggaactgacgaagcagttacaataactaattgtacagctactaaaaatggatattatcatggagatccaacaaatgcccttaataattcaggaatgaatggtgacggaataaagcttggaggtaatcaaaaaccaccaaagggaacacatagatcattaggttcacatgttgtaactggctgtaaatcttatgacaataagggtgctggattctcacaaaacaacagtgcaggaaatttatatcttaaaaactgtgatgctgacagaaatggagcaaacaatatactaaatgctaatcaaaaaactactaagtctaattttaatttcccgtacaatcctaataacggaaacgtatttacttttgaaaattgtacaacaacagggaaatgtactatatactcagaggcaaaggttataggtggaactgtatatgcaacagctcctaataatccacttccaaatataaatgactaattaaaataaaatattattaacttatctaataaaatggatgccaacaaaactggcatccattttcaatacttaatatttaaatcaaagattaaactagaggtttcaggtttgaagacttcttgtagtttttttgaatttatattataactaaaaacagctgttggataacaggataagccggctatgtttgattttttactattttttaatacgccggtaaagtatatagtgtttccatcttcagaggctgctgctaaagggggatgtgaaagctcgctgacaattgaatcttttgagttttgtaatgcactgttggttaatattgtagttaaatttccagtgctcaaagtcaattcgtaaattcctagtccagaattgccatttatgtcagaaccacatataataatattcttacaatcatggtcataagaaatattttctaccgtcgaagcttgcacttcagcaacctgctttgaattacttccatttaaatctgtttcaagtatagtatgaagtattggaacattttttcccttattttcattccatttttgtaaccttaggctacttgaatcagtagacataatcaatttattatttttactatcaaaagcgtctacttctctgtcagaattggcactgtctattatgttttgagactttgtatttaaatctatttttcctactttaacctgtttttcattagagctagttaaaaagaatacagagttattatctgaaattttagcatgtgatttaccgaatttatcattagtaaccctatgagtttgatcattagtaaggttatgtaaataaatttgccatggatcattatcccctaaagcgtctgcataggctattttagatccatcattacttaaatctccggtgacagctacatctttattttttataagataattctttgtattgtttttgacatttattgatagtatactgcctttattgtttttggagaatgaagaaatgacaatattattatgtgatggtttcactgctttagctgttttattttcaaaagttgtatttgcattattacatccaactaataaaattggtgaaaaacttattattgcaataagttttttgtaatttactgcaataataagtttctttaagagtatgtttattttaccaataaattgcaccgtagaatactccatcatcagtatttgcaacttttgaaaatgattcttgtgacatatctaagattcttccacttacatatggtcctctatctaaaattctaacactggttgatgcccagttattattttcattataaactgatacttgtgtatagaaaggtagagttttgtgtgcagcaccgtcagatgcttggtcgccagaagctgtaccaccagaccatatatcataccatgaaacataaccttgttcttcatttgaatctgaagccttaagaactttattagcttgtacacttttagcagcgctagagttgccaacaacaactggagcacctaatgcgtcataaactacagtcatattagacttaatttcaggaagatcagtagatgcggtagtgtttacttttgctgatgcttttaaagtgttctttacagcgccttgtttaactaccttcatttgcttgtttgagttatactgtattacggttcctggagtcatgtgagaaggtactttttttgtatcaagatttttagcaaaaactgaagttgattgagccacacataataatgtcattaaacatacaaaagatttagcttttttcataaataaatcctcccatatttttgcatttcatactacttattgtaatatgctcttacatattaccacataatgtattatatgtaaaataataatgtgctatatattttgactagttgcgatatttttacacattttatgacaaaaaatatggaatacgcaaggaaaaatagatataatttttgtatgtaaacatatttatgttaatatattgtccgtttttgtatgtaatttaaaagttcattaaatcaaaatatactttaaaattgcgctcattaaaaagcactcgttaagcagcgagtgtttttagtggataaagattaagttttacaatttagtaagaaaataatgataaatatgtgaatgatacttagctgcgagctttatttaatattatttcaatgattcaacaactttttcaaattgtattttgtcccagattactggcacaggatagctaggattagcttccttcatagctctattaatgatttcaggaatatcttctttttttatagaatctaatttatcaggaatctccatagattgattcattttcctaattgacaagataaaatttttagctttttccatctgagtttttccaggaacactagtagcatcagctaattcagcaagatttttgtaaatagcctcaccgtaagcttctagcactacgggtaatataactgcatttgccataccatgaggaactccatacaaaccgcctactgcatgtgcaattgcatgaacatatcctacgtaggatctagtaaaagcaacaccagcatagtaggaagcttttaacatattttcacgcacttctatgtgttttccattatcataggcttttttaagattttcaaatattagtttgacagcatctaaagcatattttcttgattctttagaactatatttattggtatatgcttcaactgcatgtgtaagagcatccattcctgtgattgctgtgagatttttgggaagtccacaggttaattcaggatctagtactgcgtattttggaattagacataaatcgcttaccgcatattttaggtgagttgaactgtctgttacaactgcagctactgttgtttctgatccggtaccggcagttgtaggaacagtgtatagtggaggaagctcttttctgattttcataagacctgccatttgacttacactttttttcggttttacaattctagcaccagtaaccttagcgcagtccattacagaaccaccacctactgctatgattccttcgcaagcttcttttttatagaactttacaacagcctcgatacattcaatggttggatcaggttgtacatcatcatatattacataagatatattttctttttttaactcatcaaacatttcatttaaactgccgcgctttattgatccagcagttgtaataactaagaccttttttacaccgtcattttttaccttataaggcagtttacagatacttttgcttccagatatgatgttcggcatacgccaaggaagaagtctttgagccttactaaacatatattgctgaagacgataatatgtatttttcaatttgagagtctcctttctttctggtaaccattagaaataggttaacttttaaaggttttttatactgaggccttttaggcatactgtcactttatggtttattagttaagcttatacctatgttatactatcaggtattatttgtaaagtgttctactgcgcctataaatggaattaactttttatttttggggggatttatctaatccactcttttggatgactcattgaccattgtaattcgtctaaaagcagctttatatgataaccatctactgtagcatgattaaccgtaatagataaaggcagcgtaattataccattcgtttcagtaaatctaccagcttcaaaaattggtgcataataattttttgcattttgtaattgcatggataaactattgaagctaaaccacggaatacaagatatgatatagttgttggaaggtggtgcgtcctttgataacataataccatgattatttccgtattctctaatatccgaaatataatttttatagaacacctcaaaatcctcattatattctgtccaaagaaatgttattgttttatcatcttcatgaaatattggataaaaaggagttcgacaatcccaatatcctagcatatcgttttgaattgccataagaaattcttgatgccttccaatagctctggttactaaataaacatatgcgggaaagaatttcaaacccttatttttcaatgtggctctaaggattgtaacatcaagtgttatgttaattgaataaataagtgttgatacagtttttgtaaagtaattatatgtgtgtgctcttggatatgtgttcatgtcaatagcgtgaaaatttgaattcatatgattatacctctatttccgtacaattaatttataatcaaattataatctcatatcgcatactttacctagctcataaataattctgtagtaaagttgtccgttctatgaaaataagaacggtaatttttatatcatctaaattgataacataaaaattaccgtttgcttttatattatttgtttttcttttcttattattcttctaatgctgtactcagtgagataaaattgttgagcaagttttttaacagacactccttgtttatatctatcaaaaatatctctattccttttttctaaaatgtcttttataccgctgtattctccccaagcttttttgctattgctttttctaggaatatatagataaataccatcagcataattctgaattaattcaataatgttctgtggcaatatattttgtgctttttcatatttcatagtgtatgctcctatctacatttaatctgtaaatataaagcaaagtccacacaaaaatattttagcctgtaccagtcaaaactaagcttcgaacaagacttctcttatatttttatgtagtctttgcacgaagctttgtctcacaatacattctgatacttgtcgcatacatagtcacctctttatgtgttttattgtgctttgatttaaaatatttgttgcagtaatctaaaaaccattagctataaaattttcctttaatttatcacaaaaatctaaaaatttaggaggaactttatctaaattcttttctgcaagagcttttaagttatcagcatattgaataaagtcaccaggatttttattctcattggagcttgagagaatatctttaggaataggatgaattccgttaatgtccattaaaaccatcatatcagctatcggtccagtcatatcataatatgggctgcaatctacatctttaaactcacttaacgtatcatcaataactttttttgctctttgggcaatagtgagatttttactgctgtcagaaatatttattgtgtctgaatttgcagtttttgtaggttcgtttttagaattacttctgctgttattattttgtggtgctacttcagtgatattaacagtatttgtttctctgttatttatgtaattagttcgcattttaatcataagtatacctccataagatgtagcatagtattattatcgcactaatacctaaattataaatatattgatttatttgaaaataatagtgtatataaaattattatttcacctaaataagttcaaagagcttgttttcatattcatacctccttaatataaatgccaatgttttaacaaccaaaatccttagcagtaacacttttagtgtaaacttcatagtgtattgtaggtcccaaatttagtttaatctaactttcttaaagctatgtaacattttggggcgatacatgaggtaaagaaggtagtgtatatatggataagttaagtatacgtgaagacaactacaatataaaacataaaacaatttcgttaaatagagcttcaagtgttacaagaaatttaaaaggattattaaagtttttaggaccagcttttgttgtcagtgtagcctacattgatcctggtaattttgctacaaacattagtggaggttccagcttcaattataatcttatatgggttattctttggagtaatttgatggctatatttcttcaaactatgtctgcaaaattaggaattgcaactggctgcagcttacctgaaatgtgtgctaaggttttttcaaaaagagcaaattggatattttggattgttggcgagttgggtgctatggcaacggatttggcagagtttattggaggaactttaggcttgtatttattatttagaataccaatgatttatgcaggactacttacaggagttttaacttttataatagtttacatggaaaagtatggtcaaaagatggtagaaaccataatagctgctttaatagctgtaatatgtgttgcctatacaatagagttatttcttgccaggccagcgtggacacaggtaggaatgcatactttaattccgagtttacctaatggagaagctgttctaatagcggttggtatgttgggggctacggttatgccgcatgtaatataccttcattccgaattggttcagcatagaaatacaaattcatctgataaagaaaagttgcatcacttaaagatggagaaaatcgatatacttatagcaatgaatattgcctttgttgtcaatgcggcaatggtaattgtatctgcagccgtattctttaagcatggaataaaagtaagtacaatagaagaagcacatagatcactacagcctttactcggaaatttatccagtggtgcctttggaatagcgcttttagcatcaggattatcttcatccgccgtaggaacgatggcagggcaaactattatgaaaggctttgttaatttaagcatacctataaatttaagaagaattataactatgcttccagcactaattatcatagctttaggtataaatccaatgagagtattagttttaagtcaagttgctttgagttttatacttccgtttcctataattcaaatgcttttaatagctgggcgtaaagatttaatgggaattttagttaataagaaatttactaaaattgtaggctttataattgcaaccatgataattttgctgaatataatacttttatatttaacctttacaggtcaaacttaaggtttaaaaggttttattgtaatcaggatatagcaaagattcaaattctattttccgtataaatcattgccgtatcctgttaaaggtttaatactatagtatattaagtttttatataaattattactaaaatataattatttaaaaattgaagcactttgtgattatactagtgcttttatttgtgctgtgctaattggccttatttcacatatttaaagttgttttgaaaatgttgattccagtaacagcagactaaataaacttatgaatctaacagctaatgcattaaaaaatttaaaataaaacaggagtttacttttctaactcctgcatgtaaaaattgtttttcatctttaaaacttgattttagctacgttattgatgcttcataaatctctttaatggagtttgatagtgtttcattgaattcttcgtctgtttgatcaatacttaagttctcagatagcgcccttgaaaagctagcaattaaaccattattacgggacaacctttcgttagcttcagattgactatagcctccagacaaagctacaattctaacaacatgtgggtccttcattaaatcgctataaaaattatccttagttggtattgaaagtttaagcattactttcgtctctttatcaagatctgataagtgttttgaaatttcaagctttaaaagttcctctgatttttccttatcagtgcttttaatatcaacctctggttcaatgattggaactaaaccttgattagcgattttatctgctaattcaaactgctgatcaacaaccattttaatacctttagaattagcctccttgataaatgaacgcatttttgttccaaatatatttttttctatggcggcttttaaaagttcatctaaattagttattggcttcataagctgcacaccattttctagttcactcaatcctttatcgatttttaaaaagggtacaatattcttttcattccagagataatcagccgtgtatttatgatcaatagttctatacattgtattttcaaataatatagctcccaaaatatattttgaattgaaggctgtactttttatgatacgttttctcatctcatgaactaagttaaacatctcttcatcattagaataactattttccttaattccatattgaagtaatgcttttggagtactgccgccactttggtctagtgcagcaataaaccctttatctttacttatacgattcatttgagtttcattcattacaccttactccttcctttttagagctgcattttatttttacaatatatagtataagcaatgcgcaaacatttaatttatgaaattatatttaagttttattggaatgaaattagggctataagtaaaagagtttgataaagctccataattaataacaatttgtgattataagaaaatattgtatatatatgggccttactaaaattgtaataaatgatacttacatggtatactaattttataatatttgctaataattaggcgttttacgatatataatattaaaaattattaattaacttagtgatttcaaattatgagtaagcttattcgtgcattaattattattaatgtcggcgtgggtaagtactctcaagcaaatgaaaaaataaggaggatctataatggcaaaaataattaaacacttaataaataccacaatagcggctgcaatagttttgaccataggtactggagtacatgcagcgccaatttataaccaaaagcatgaactagtacaaccagacggaagtaaggtagaagttaagattactggagacgagtattatcaacaaatcgaaagtatggatggatatactttatgtagagataagaatggatggatttgctatgcacagttaaatggagataaaactgactatatttcaacaggagctgtgtataaggataatacactaaacgatatgaagctttcaattaaatctgataatacagcaggaattaaaaataagcttcaaaagcatttagaaataaaaaaggatgccatagaaaagaaagctgatgcggtaagacaaaaacttcacgcaatggactatagtcctaaagaaataaagaaaaacagcaataacattaatggattgttagaatctaaagttaaagcatctaacataagcaatgtaaatggactagctgttttagtagatttccctgataaaaaaagcgatataccaaaagctgatatagaaaacttttttaacggagtaaattacacagggtatggtaacaacggttcaataagagatttctactatgacgtatctggcggaaagcttacttatacaaacagtgtaattggattttatacagcaaaacatcctaaattttattatgatgatataaatgagactacaggatcatatgcaaaagctgatgaacttgcagatgaagtctttgattggttaaaagcttctggatttgatgcttcaaaaataacaactgattcaaatggatatgcaaaggcagttaatattctttatgcagggacagctgatgcaggttgggcaaaaggattatggccccatcaagcttggtatggcggttctgatagtatgaatggcgttaagatacaaaaatacgagatgtctgatatagaaaacgacttgtctatatatacaatatgtcatgaaagtggacatatgatttatggatatccagatctttatgattatgatggagattcagagggaactggaggatacagcttaatgagtggaagcagtgattataagaatcctgtaccaccagatccatattgcagaaatgttatatctggatggaatgcaccaataagtatgaattcctatggaagtggaactaaatttgatgctgtagctaatgctaatggaaatcagtactcatatagatggtcaagcagtaatccaaaggaatattatttagtggagaacattgagaaaaccggtagatatgctggtgttccagattcaggactagctgtttggcatgtagatgaagctggagataattctaagaataatatgacatcaaatagccattatttagtgtctcttgagcaggctgatggaaggtttgatttagagaagaatgtaaatggaggagacacaggagatttatttagagcaggttacagagatgcctttggagataatacttttccaaattctaaatggtggaatggaacagcttcaggattaaatatatctcaaattagcggtttgggaagtgacatgacctttgttcaatcaggcttagttataaacaatccatatacgaatatagcaggacaagctactgcatcaacttcatatgtgtctgactgggagagcataagcgccttaaatgatggaaaagatcctacaagctcaaatgacagaagtggtgctgtgtatggaaattggccaaaaacaggatctcagtggatagagtatcaatttaataaaccatttactatatcaagttgtgatgtttattggtttaaagatggacaaggaatagatgtaccagcttcatatacaatattatattgggatggcagtgcttggcagtatgttaaaaatcccaagggcttaggaacagctattaataaatataacacaactacttttactccagtaacaacaaatgctattgcaatacaaatggagtcaaacggtaattactcaacaggtatacttgagtggaaggtgtttggtaaataacgttaaatacaataataaaagatgatttctatatttgtgtagaagtcatcttttttaatattattgatagctatgatttttccttaagtagtaataattgtatagtagaaaagttatttctactatgtttgttaaaatactaacttaacaatgggatatacataattgcgtataaatttaactaattaggaataaaatattgtaataatgattatcaagattttaaaaaaaataacgaaacaatattcagtacaagttttaatacaattggtgttataacccttgagtttaagcatttttaaacattataaaatttatcaaaaaatacattgaatgtgagcaatcacgtcagaatattttcagatatataaaattttaattgaaacattaaataaaacgtgttatgataccaatgagggtaaggtaacgttttcttaactataaatttccaatttgttaacaaaaatattgtttccaaaatagcttaataagggaaaagggaggattgttcgatgtaataattgcagatataaatttttttttcacttattaatgaaaacgtattaattttggcatttgatataatttttaacaaaaataaagataaactgcaaatatttggggtgtatatttctttggaaggaagagaatgctagtaaaccgtatttctccttataagaaatactctaagatatttttaaagttaaaagaacgtgacattgaattagaaatttcaaaagttccagggggtcgaaaaaataatctttttagttgattcagaaagaaattcacaataattaattttggttacaggttttccagaacttttttataaatttttctgtaacaaataaaaaaataggaggtataaagatggtaggaattattcttgctagtcacggagaatttgctaagggtatcttgcaatcgggtgcgatgatttttggagaccaagagaatgtgcaagcggttacattaatgcctagtgaaggccctgatgatgttaaagcaaaaatgaaagacgcaattgcatcctttgacaaccaggatgaggttttattcttagttgatctttggggtggtacaccattcaaccaggctaatagtctatttgaagaacataaagataaatgggcaatcgtagctggtatgaatctaccaatggtaattgaagcttatggtgcacgtctttcaatggaatctgcacatgagattgcagctagcattataagcacagctaaagaaggagttaaagttaagcctgaagaattagaaccagaagatgctggtaaagcttctcagggttctgcaaagcaatctaatacaggtgcacctggatcattcgaatatgttttagctcgtattgattctcgtttacttcatggtcaagtagcaactgcttggacaaaagctatgcaacctacaagaattattgtagtatcagatgcagtagctaaagacgagcttcgtaagaaattgattcaacaagctgctcctccaggagttaaagcacatgttgtaccaattaatcacatgattaaacttgcaaaagacgatcaacactttggaggacaacgtgcaatgcttctttttgagaatccagaagatgtactaagagtagtagaaggtggcgtacctcttaaaacaatcaatgttggttctatggctcactctactggtaaggttcaaccaaataaagtacttgctttcaatcaagaagatattgataccttcaataagcttaaacaatctgggttaacttttgatgtccgtaaggttccaaatgattcaaaaggaaatatggacgaaataattaaaaaggcccaagacgaactaaataaacaaaaataatctaactatgtatatagtaaaggaggattaaccgtgactctaaatataattcaaatgggattagtagttattgtagcgtttctagctggtatggaaggtatattggacgaattccatttccatcaaccagtaattgcttgtactttaatcggattagttacaggtaacttagtaccttgcttaatattaggtggtactcttcaaatgattgccttaggttgggcaaatataggtgctgctgtagcgcctgatgcagctttagcatctgttgcatccgcaattattttagttcttggaggacaaggaaaagcaggagtttcttcagctattgctattgctgttccactagcagttgcagggctattattacaaactatttgtcgtacaattggtataatcattatacatcgtatggatgctgctgctgaagaaggaaatataagaaaaattgaaatgtggcatattattgctatttgcatgcagggtgtacgtattgcaattccagcagctttgattttagcaattggtgctggtcctattcgttcattacttcaagctatgcctctttggttgacagatggtttagcaataggtggtggaatggttgtagctgttggttatgcaatggtaatcaatatgatggctacaaaagaagtatggccattcttcgcaattggttttgtgttagcaacagtttcacaaattacacttatcggactaggtgcaattggtttagctttagctcttctttacttatcgctttctaaacaaggcggctcaggtaagggtggtggatcaaatactggtgatccattgggcgatattatcgatagatactaagaaaggagagaacacgaaaatggcaaatgaattaaaattaacaaagaaggatcgtatttctgtttggtggcgttcaactttcattcaaggttcttggaactatgaaagaatgcaaaacggtggttggacatttgcattaattcctgcaatcaaaaaattatataagaataaagaagatcgtgtagctgcattgaaacgtcacttagagttttttaacactcacccatatgtagcttcaccaatcattggtgtaacattagccctagaagaagaacgtgcaaatggtgcaccagttgatgatgtaactattcaaggtgttaaagttggtatgatgggacctttagcaggtatcggagatccagttttctggtttactgttaagccaattttaggagcattagcagcttcacttgctatgagtggtaacattcttggaccatttatatatttctttgcttggaatgccatccgtatgttatttatgtggtatacacaagagtttggttacaaagcaggctctcgtattaccgatgatctatcaggtggtttactacaagacgttacaaaaggagcatccatccttggtatgtttattttgggatcgttagttaatagatgggtatctgttaaatttacaccggtagtatcctctgttaagttaagtgatggtgcatatattgtttgggataaacttccggctggagttaaaggtattaaagaagctttgattcagcagtcatctggtttgtcgttaacggatcataaagttacaacactacaaaataacctggattcattaattcctggacttgcaggattagcagtaacatttatttgtatgtggttacttaagaagaaagtatctccaattgttattatttttggtttattcataatcggtattgttttccatttaattggtttaatgtaatatttcttacttagcctgggctttggctaaacatattattgattttaatttaatatgtttaacttaagcctaggcttttgttaagaaatagattgagaaataatttttatgtatcttgagacgcttaattattttattaataaaaatgtatgaaaaaactgcgataatgcattctaatataagaagtgttatattatcctatttctcttacaatggcttcttaatttctaaaaaaaacatataataaaaacaaatgattgtatacattagaaaagaggtagatcgtatggttcaatcactcaatacaaaggttgacttagtaattaatgcaacatcttttacagggttttcagattacggcagaatcatgattggagacaaaggttttgagttttataattcccgtgattctcgcaaatttattcaaattccctgggaagaagtagactatgttattgcatccgtattactaaaaggaaagtggattccacgatatgcaattaaaactaaaaaaaatggtacatatacttttgcttctaaggatgcaaaaaaagtgcttcgtgttattcgaaaatatgttgatccaaatcatatggttcattcgttaagcttttttgatgtagtcaaacgatttgtaaaatcaaggtttaagaagagctgatgaattaatatgtaaatataattaaagacatatcaatgagatatgtctttaagaaagcccaaaagtacataaatatttattttttcatgagcttatttatatagttagagctctaaacccttcatatatttgcttaatgtataagctatgccatcttcttcgtttgatagggtaacttcgtctgctgcattctttaactcctgcacagcattatccatagctactcctataccagcatatttaaccattgaaatatcattatgtccatctccaaaggcaatcatttcttcttttttataccccataggaattagtaccgtatccagtgctttagctttatcaattccttcagcagtaaattcaaaatagaaatctgctgtaaacatacagtttaagctttccttaaagggttccatcatttctttataatgtttttttaaatattcaggctccccagctgttaaaattttatttaaaggatagtctgcaaaggcagccaaatcatgtttctcacataacttaaatttattattacgtgactcatattgaattatgttaaaaggttcacctttatattgtatctcgttatcaaacacatcattaacatacatataatcacctttgtcaatcatgggcttaacctcaaattttttcatgtgttcaagtactgcttgtccttgatcgatgctcattgtttcattaaacaaaattttattagtttcacaatcaacaactcttgctccattgaaagaaaccaaaagcccatgatttttatccatctctagttccttggcaaaatccattaatcctgaggtaggtcttcctgaagccaaaattaatacagcacctaattcctgggcctttttcaaagctttttttgttttctctgatattatttttttactagtagttaacgtaccatctatatccataataattacttttacatcactcatagtctacctcctagctttttatttaattatactagtaattatatatatggacaagacaattaatgctgcaaaaatatatagtaattattaaatataaatggtaaagttgtgtaccagaactctgcttaaacaacagggctaataaaatataacattacaattaatttgctgattcaaatgaccatagttgatttttatttcctgaataagaccactgacatacatttgtaccatcagaagttcccaaattaaaatcatccaataccttagttccattactgctcttggttgcaatagcatataacccgtttgttgaagaagcttttacagaaaatctttgagcatctccgccatatgcattaaagatttgaatgttgcttccatccttatcctcaccatagcttacgtcaagcatataatcacctaatgcactctttaatgtaacatatccatctcctacatttgttaaataccatttttgtccgttagattttgaacctgtacgaagttcaacattttgaccagcttttcctatattatctgttacttgaagatatttttgagcattaacatttttaagataataccatccattatttaatgttacagtacttcctacattagtagtaggagcttgatttgctggaaatgctagctgaagaaaattccacatagcaggtctccaaacactaccatcgtggccgccaccttgaactgacaaccagtaatgaggaatgccattcttaacgcagaagttgtgtgtagctaagtttggaggataaaagccatcccaatcagaagttccgcaggaaaggagcaatgtcttaagtttcttctttgcttcagcaccgttatttgggaacatattctcatctgaaggatgattaaatggtgtagcagaagatggacaaatgtggtggaaggtatctaaatgtccaataccttcagcgaaggttaccccaccacccatggaatagccgtaaagtccacgatgatcagcatcagcaataattggataatgtgattccacgtatggcatgacaacattaaacaattcctgatgagaatcaacgttgttgttatccattgctactattattacaggttgaatttttccctgaccgataagattatcagctagagtacttgaatcgacgcaccagctgtcgaaaatagttgaaggccaagaatttatgccatgaattgcatagataacaggatactttgtttttgaattatatcctggtggtgtgtagactaccatctttctcgtgctcttagttactgatgaataatagttgacatcttgaaccttacctgatgggtaattaccatgtttgtcatatccagcaggtggcattgttggaagtgcagttgctgatgaattgttagttgtcgattttatttgtacagacttagaaatgtttaaacttgcatttgaagatgctagcgctgtaacatttgttattgtagcagtttgcataaataacaaagtagtagctagacctaatattaattttctttttaacataaatattcccccttaaaattagtgttttattgtttatagatcttttcattttataaacacatataaatttataattttgcattaaaaaaatatttttactatttttataataatattattacattaattatgatcatagttataagtttaaaattataagcgtaaaacttcaatatgcatatgtttcaatgataataccaaatatttatgcacgtgcataataatcaatataaaatgttaaataatattattacatatataaaagtaaaaattgcttataaactatctttgaaaaatattataataccatttagaaaattttttgttgaatcctgggtacacaattcattccataaaatttcatctttttttaaattgattgtctaaaagtgatagttaatgaattcatgttcttaggctagtatgtatactataatggcaagtgcacaggtgtgcttatttatgaattcacaataattatcaaataatgttacaaaagtataataaatgtaaaatgtacaaaaaagtacttgaaaagtaaaaaatatacatgtagaatataagtatggtagaaattaccgatttcaaaataaagggaggatgttaatatgttaaatttatcaattgaagaacaaaaacaaattcttgggggaagatggaaggctgtcgtttatgatccatctggtaatgtttatgcaacagcatattttagtacagattctgcagcaagagattgggtagacgaaaactatccaaattgtgtagctaacgtatatgaagtttaaaagtaagattataatacataacaatttaatattgctattttaattgttatgaattgagagctgatttcattttggaatcagcttttcttacaaaaagttcaataaaataagctattaattattatgaaaaataaaaaaggtgaggctatgagtatactgaaaaaatattattgcgtaaaacaacatgatatacaagattgtggtcctgcgtgtttagcaacaatatctaaacaatatggattaaaacttccaatatcaaaaataagagaagctgcaggaacagatttagaggggacatcagtttatggaattgtacaagctgctcaaaaattaggatttagtacaaaagcggtaagaacatctaaaaaggaagaaatatttaataatctcccaactccattaatagcacatgttattatagatgatgtgttgcttcattttgttgtagtacataaaatcacaaagaaatatatattaatagctgatcctggcagagggatgattaaatataagcctgatgagttttttaaaatatggagtgatgtattaatttttcttacgcctacagctaagtttgaaaaaggtgatgagactaaaggaatttttcaaagattctggggacttgttaaggttcaaaaaggtcttttattgaatatatttatagcatctatattggttacaattttaggtatagcaggttcattttattatgaatttttaatagatgatatattacctaataatcttaaagctagcttgcattcaatatctatagctatgcttatattattactttttaagatagtaactgaattttttaggaaaacgttgttattgtatatggctcaaaacatagatgttccattgctgcttggatattataatcatgttgtaaaacttcctatgaacttttttggtacaaggaaagtaggagaaattatttcaagatttaatgatggagataaaataagaaatgctatttcatcagttacattaactttaatgattgatgttttaatggcagttgtaggcggagctattttatatcttcaaaatttgaaattgttttttacttgttttgttcctatagttttatatctaatattagtgtttggatttaagaataaactaaaaaaagttaatagaagggttatggaggataatgcttcactaacttcatatttagttgaatccttggaaggtatagaaactgttaaggcttttaatggtgaaggattagtaaggctgaaaacagaaaataagtttttaaagtttatgaaaagttattttaaacatggatatacttacaatgtacaaggaacattaatggacactataagtgggggctttggcatatgtttattgtggtttggaggtagtcttgttttaaaaggagaagttaccattggagaacttataagctttaatgcacttcttgcttattttattcagcctataggaagattaataaacttgcagccacagcttcaggaagcaatagttgctagtgatagattaggggagatattagatttggaattagaaaaatctgatgatgaaagtataaagcctgaaactcttgctggttgtatatctttagaaaatgtaagctttgcatatggtatgagggataatgttttaaatgatataaatattagtatacacaatggagaaaagattgcgttggtaggagaaagtggctcaggaaaaacaacgattgctaaacttttaatggggttttataaaatagatcagggaaaaataatattgaataattattacatagatgacatagataaagaaactctaaggagtaagataagctatatttcacaggattcttttttcttttcgggaactataaaagaaaatttagagtttgtaggtgatgatgtaacttatgaaaaaatggttgatgcttgcaaaaaagctcatatacatgaatatatagaaagcttacccttaaaatataaaactcctttagaggaaaagggctctaatctttcaggggggcagagacagcgattatctatagcaagagcactattaaagaaacctgaaatattaataatggatgaggcaacctccaatcttgattctataactgaaagggctatacaaagaactttagaggaatgcacagagaatgtaactactatagttatagcacatagattaagtactattaaaaagtgtcaaaagatttatgttatggacaaaggtaggataattgaagaaggcagccatagagaattattagataaaggcggatattattataggttatggactgaacaaacattagatgatgaagaacagaaaatagtatctaattgtatataggaggaagctaaagtgagatataaaattgaagacttggaagatttaacagatgctaaaagttttatgaatggctatttagcttcatgttcatataagtttttaaaatatattatttatataataatagctattttagtttgtatagtaatatggtccttatctgcagaaaaatatgttacagtaaatgcttctggtgaaatagatactaagaacaatgtctgtaatatatatattgaaaatactagtataggaagcataaatgaaaataacaaagttcagattgaaatagtatctttaccaagaaacgagtatggtgtgttaaagtctacaataagtcgcgtaagtcatgatgtaacagttgatcaaaatagcggcagaaaatattatacagcttcttgtattcttcatagtaacgttcttaaaagtaaaaatggagaagctgtaaaagtaaaaaatggaatggaagctaaggttagcataattacttataaaacatcatatttcaactatatattagaaaaagtaatgtgatagttagcttttttaaatacagcgggagcatttagtatagatcagaggagaatgtatatgtattacattctctaactttatgaagtggtaattaattttattgatgacttaatattttgtgttctttcttgctttttttgatacatataatttttttgtgttgtctattcctgcataaaatacctcggattcattttttatattttggctgtttagctgtgaaagtagccaatctatatctagacctgccttatataaattttcatctaatatatttccgtcaattattatatcttgcgtaagtcctgtactagtaacattgatattcatattactaggagttagtggtttttggcttgcctttggtaatactgacagttgaccgtcgatttctattattgcaaattctacatcggccatattaaatatgtttttttcccttaatttcattaataattcattaattgtaattctactctccttcatattttcttcaactatatttccattatcgaccaaaataattggcttggaattgattatttctcttaatttaagacttttaatatgtatatagccagttataattactaaaatagataaaacagtaagtgcagttacagaagatatggatgtgaatttctggccaacaatagaatctgtgattattgaacccattgaaactcccataacaaaatcaaaaaatgtcatttgagatataagttttcttcccattagcctagttagaaacattgctataaggtaaacaattacacttctaaaaactgtattgattaaagggtcttccatatatttaaattctccttttacactaattaataaagtactagagcttattattccacaaaacttaaattaatttacgcaattttaataaggtttatagcttttatactaaaaaaggagaaaagtttaagaaaataaggtatactaaatttaatattaaattgtattgctatattgaaaggaatataaaatgctagagaaaagaagcaaaaaaataaatataataaaacgtttatttctatatatcttagtatttgctgctgtttttggtggaattgtttatctaaaatatgctccgactgttaaggctctacataatagtgcagcattaaaagtaaataattgttcagagattacttttaagaataaatctatggatttgaataacggtaaattaatatatctaaaatcaaatgaaattcctgaagaagtaaaaaatgcttttattgctgttgaagataggaatttttataagcatggaggtataagtgtagaagctgtttttagagctgtttattcgttctttacagatggaggtaaaataactcagggtggaagtactataactcaacagttatcaagaaatgtgtttttaaattttaataagaattacaaaagaaaattagaagaaatgtttattgctagtgatcttgaagagaaattcacaaaagatcaaatactggaattctatataaataatattaattttagcaatggtgcatatggtattgaggcagcttctgaaaaatatttcagcacagaatgcagcaaattaaatctttctcaaatatgtttattagcagctattcctaatgatccagagtattataatcccttggtacatttgaataatactttacagagaagaaatttaatactggaaaagatgaaggaaaatgactacataacggacaaacaatataaggaagctgtaaactacaaaatagttttaaatcctaaagattagttaggaattttagtattttatattatctattgcagcctttaaaatagctaaaaacttatctatattttgcggatagataagtttttttatcaatagattattattgaagagagagttcactgcaaatcaagttagccatttcacttattttattgtttgcattattacaagcatttacaagtaatggtttataactttcactatagttattacctatataacacaatgcatctattttccatttccaaagatcttccggcgataggtagaaaaatttaggttgtaccttttcgcgataaaaatcttcatccatatttaaaatattttctggagttaatgaaggagctaattctgcgaggccaggaaattcctcctcatccttccattttcctttattcattggacatgcatcttggcaaatatcacaaccataaatacagtctccaaatttttttcttagaggttcctctggtaaattacgtccaccaaaagttgttaaaaatgaaacacattctgttggtgacattgtatagggctcagaaagggacttagtaggacacgacattatgcagcgattacatgatttcggacactttttaacgttgtttgtttcctttagctccattttcctatcagttacccaagcttcaagatgtacccaagaaccagattctgtgtatagaaaattatttctacgaataatgccaactccagcttgtagagcggcccagcgcatgccaaccactccgaacttctgatttgtctctacctttaagccaagttcttgcatgtactcttctagtgcacgattattttgatattcttttgtatttttatccacacgggtatcaaataaatatgctttagctatgtgtccatttaattcttgaggaaccttgtattttccgtatactgacgtaagtactaccacagattttgcccacgggtatatctccttaggtttaattaaacgctcttgactcttgtagaacatttttgattttgggattttttccatgcgttcattaaacttatcagcatattcatctattaaattaattggaataataccacacttttcatagcctagttcataagctttcttttgaatactttccgcaattgtatccatattgaacctccttaataacttagttatatataactatttagtctctttcaactacgagagctgttccctgacctccaccaatacatagagtagcaagacctttttttgaatctcttttttgcatagcgtatagtaatgttactaaaatacgtgcaccagatgcacctattggatgtccaagtgctatagctccaccattaacattaactttactcatatctaaatttaaatctctagttactgctatactttgagaagcatatgcctcgttagcttcaattaaatctaagtcttcaggttttaaattaattttatctaaggcagctttagttgcataaaaagctccatatcccattattgatggatctaccccatatgatccgtaagaagtaatcttagcaagtggttttattccgagagcgttagctttatcagcgctcattattactagtgctgcagctccatcatttaatccggatgcattacctgctgtaacagtaccattttccttgaaaataggtttaagttttcttaatgcttcaatagtgtttccgaatctaggaaattcatcttgatcaaagactatttcaccttttttagtctttattaatacaggaactatttcatccttaaattctccatttttaatggctttttcagctttttgttgtgacataagtgaaaattcatcttgctcttctcttgttatattccattgttctgcaatattttctgcagttactcccatatgatatccattaaatgcatcccacaaaccatcctttatcatttcatcaactaattcactatctcccattctttgaccccatctctgattgttaatcaaatatggtgatctagacatattttccataccacctactacaatggtatcagcatctccagcttttataatttgagctgctaaacttatagatcttaaacctgaaccacaaaccttattgattgtaaacgcaggtgtttctaaaggtaatcctgcttttactgctgcttgtcttgctgggttttggcctaatccagcttgaagtacatttccaaaaataacttcattaatctcatttggatttatattagctcttcttacagcttcctttattactatagctcctaactctgttgcaggtacatcctttaatgtttttccatatgctcctattgcagttcttacagcacttactattactacatctctcatgttttactcctcctaaataataattttatagaatagactggtttgtttatttcgattaaagttatgtacatttttttatataacttcttagcctccctttaactatttcacctccttgaaatcctcatacatttttataagatcttcttgcatggtttttagagtatttatatccttaccaattctatagtacactaaatatccttcatatattgcaaaagcacgatttgctagtatatatatattatctttaggtactccagagtgttcaaaaattgaagcaaataaatctattaattcttttatagatttataataacattttgaaatatcggaatccaagaaagctatttctaatcccaatactgcaaaagggcaaccataatgttttcctttttctgctcccttaatcatttctcctactaaggatattataaattcatcccacttcttatcttttgaatttatttttatccatcctaaaagttttttttcaaaatactctgaaacactaatggctaaatcttttttacttgcaaagtgaaagtaaaatgacccctttggcaaccctgtccctgatagaatatcattaatacctgtaccattatatcctttttgtaaaaataatttcgcagcacattctattagttttatttttgattcttctcccttggttgtctttgccattttatattctccctttatcaatttctttaatttaatattagaccattctgtccattttgtcaactgctttttaatttttgttatataatttattataattagtactatattaattctgtcaaaaaaaaatcttctagaattaattcaagctggtatttgtatattttaaaaaaagtataaataatttttttaaaataaagacgttttaatatgtgtattaaaaaataatcatatctaaaatataaaaataacgacaaacataaatttgtcgtcattttatggtattatatagtgtatgatagttattagtttagctgttattccaaataccgaagattgaggtgatttaattgaataaaatgcctatgaccttaactgggtttcttatttacatgactaatattaagggaaaatccaaaagaactcgaaatgaatacaagaatgatttaattcttatgttaaaatatattaaagttataaaatatgatattaatacgaatggtatagagaatgtggatatctcagatattgataatgattttataaaagccatatctcttgaagatttatatatttttttagaatactgtgaagatgaaagacgaaacggagcatattcccgtgcaagaaaagttgctgctatacgctcattttttaattatcttactacgaaaaaaaagatattagattacaacccagcgcaggagctggaaaaacctaagcttccaaaacgtaatcctgtttatctaactataggacaagccaacacatttttgtctggaataaaaatgaacaaacattactatagaaatacctgtatagtcaccttgtttttaaattgcggtatgagagtatctgagttatgtaatataaatattaattctataaaaaacgatatgatatcaataatcggaaagggagataaagagcgtactgtttatttaaatgatatgtgtatagatgcaattaataaatacatagagaaggaacgttcactacagaaaaatataaaatgccaacaagctttatttatatctcaaaaaggaactcgaataagtgtgcgaactatcgaaaacctagtaaaaaaaataaatgaagattcaaagcttaatataaataaactcactccccacaaattacgtcacacatttgctacaacaatgtatcaagcaggaacagacattattagtttgcagcagttactaggacatagtaatgtttcaacaacgcaaatatatacgcatgttacggatgatagattaagagaagccacaaataaaaatcctttcaatattcaatttaataagaagaaatctataaaagaacaataaaaaactccataattttctctatataggatattatttctgtacataagtatacaaaagaaaagggttgaattgagtatgattttatcattcagtatatttttttattgtaaattgttctataaaattcacatgttgttctattagtaacatggcaacgattagtgtaaaaaggggtaataccggcggacgtgtcatgtactgaaaagcatataccatattgagggaaattaatgtttacttttatggctggaataagtcaatttgaaagagatctaataagccaaagaacaaaagaaggtcttgctgcagcaagagcgcgtggtagaaaaggtgacagaaaaccaaaactcgatgataataaaaagaaagcaatatatgaattatatcagcagaaaaaaacaacagtaaaaaatctgtgcagtatgtttaatataggtaaacctactctatacaaggttatagaagaaattagtaaaatcaaggtatcatagttatattttaaagttataattaatacgcagttgtaattttatgcgtcataatcgtataatatggagaccatttatagaatctctatttttctttataattaatagattatgtttctaaaaacttcaaaagagcatttttgtttaatatgagaatttttttatatttagtattaatccattgatattgagagaatttgtttaaagttctgcttaccgtaactctacttacacctacagcctttccaatatcctcatgtgtacaattaatagagcaattattagatagactcacatttagtaggtattgggcaattcttttttctgctggtaaaaatgaaatactgtcaatttcatttgataacattcttacctttttcgatagaagctctatgaaattcaaagcaagaagtggctctttttgaaaatataacataatgtcagatttattaatattgatgatttccgaatctgaaaaagtttttgccgatgacattcttggaaagccatcaaaaaaagaagcttctccaaaaatttctccctttttataaattgccaaaattttttctaagccatctgtggaatttacaaaaacttgaactcttccttcttttaggtaataaaaatttttagcaatttctccttgacgataaattatttgattatctttaaacatctgtgcaggtcttgtcttaaaagtttcaaacaatctagtaggaatacctattttatggagtaaaaacaaatcccatgtattcaagaaaaaacacccccatttagtaattattttttaattgtatcatagtttacattcttcataaaagttttatgtgataatataataaaacaatttatggaggtagcaaaaaaatgaaatggaatagtaatctatatgatcataaacattcttttgtagcagaatacggtaagtctatgattaattttgtaaatgtgggaaaagatcaaaaaattttggatttaggatgtggtacaggggtattaacaaatgagctggcaaaaaacggtgcaactgttattggaacagatttatcaaaaaatatgattgataaggcaaaaactaattatcctaacttaatctttcaagtgaaggatgcaacaaatttgtcttttaaaaatgagtttgatactgttttttctaatgcggtttttcattggatatcaaatcaagaaaaattgttgcattctatttatacttgtttaaaagataatgggacattgatttgtgaatttggagcacaaaataatataagtcaaatacaaactgcttttgaaaaggtaatagaacaaaagggatattcttattgttcaccattcttttttccttcaaaggaagaatataagttattattagatcaagctggttttgaagtaaaacatatcattgaatatgatagaccaacaccacttgctgatggtgaaaaaggactacgtaactggatttgtcaattctttgcaagtgatttactagaattttcagatgaacaaaaggagcaaatattatttgaaacagaaaaactttgcaaaaatagcatatggaaaaacaaccaatgggtagcagattacagacgtattcaaattattgcggttaaaaataaaaacaatggtaccaaatgaacataataggtaattacattttttaggttcggaatattcctatattgtttactaactaaggccacgtcaggatattaattcgagcatgtaatggcactgatattgtcttattataaaaacataccatttcttgatgctttcatgaaaaacaggatggatgaaaattctgtaaataattttgtgtaaactttagaaaaataaattttaatttattaaggttggggagtaaatataagacttcaaccttattttgctttaaatgtatctttgcattataattatattatacataactataaatagtttcctttgatgggtgattttgcttgactataaaatgtatatcgatattaatggagatgaatataatgaataaaaaaattttttttggatcttttactattatagcttttttagttactactatggctgtttataaaaatactcatgctatattaaaagcatcagacactaatatagcaaaaaattcaaataaagttcatattaaaagcaattcgtttaatccactaactgcaacagataaagaattgattgaacatggatatccttctaagcctaacgataaagacggtatagaggcatggaaaaaggctgtttctgtaaaagttgtaaaactagaatttggttctccacgtcctgatggtagtcatagtattatagtaaacccataatataaatttttcaagacatcatgcttatttctttcttattcttgtaatgtatatcaaatatggcaatggtgttaatgcaaaaataaaatatttacttccatatctattagcatcacctttataattgaaatgtaatggtatttgatctggtaaaactaacactattaacgcaagtacaactaatggaatgacacataaggctatcattaactttttttcttttttcataatagacacctccgatgtggtacaataaagttgtaacagctcgacctagtagattataatatctattttttattaaatttacattatctgcttccttaaacaagtacaggaatatttccactcatctcgatattcctacaagtataacaactcatctacactatacacatacttaagcattcaatttaccgaatactttttataaattatgcaggatacacccaaaagaggaattaccactgcactaattgctattaacaatgtaagcattccgaaagcctccactataattcctgcaattggatataaaatcattgtggatgtcgataccataaaagataccatggataaaaaggttgatcttatgctatcatcaacataagcattaaatgacttcatcgcaattggatctaaaacatctattattacatagagtaatgctaatccgatgaatatcatttccttatttcctctcagcccaacgagggagactccactactcatacatagaacggtgactaatacaagttgcccatatcttttattagaaattctatatgcctgcgtcgcaacaattcctcctataaaactcaacagcataaaaacggtacctgtttgagtatttgaaaatcctatttcacttatataatctggcataattccaaatacggtattgatcacaccaaacgtaagacaaactaaacacatcataaacactatatgaggactgtttctcacttgtaaaatacttgttaaaaagacctttattgaattttttccattttcattttttcgcaaagtcttcttaacattatgttctttgactgtcataatggaacctattgaaattattgtcattatgcattgtccaatatatggtatagagttatttattgtatataatattgttcctaggctagttacaattccaacagaaattgaagatatcaattgatatcttcctctaattttgtcatactcagctgcgtatccatctgctctaatattttcataaaataacgcatcatctgctccacttattagtgctcgtcctataccttcaattgcaaaagcaaatgctaatatgacaaatggattctctgcatttacgacaagtctcgaacatataagaagttgtgcagtagcagacaatatcaatccgtaagttgtaatgttcttctttttaaaaaaatctcccaacattccagacggtacttccattacaaactgggtaatagaaaaaatagattgcagtaatgtgaactgaacaatgctaatatgcacacactgaacaagatataatatgtttacgatccttgttaatctcatttgtacaccaaatgtatataaatagtatttaataattgataatttacttgatttcatgccatacatcctttaatttttctgctagtagctgggtatcatcctataaagaaaatcaatgtcgtactacattctctaccttaacttattctataaaaaacacaaaatacctcccatgggatatagaagcatatatacagttgtgtgtaaaatatgtatataattaatgtggtaaaatatcagcaaacaaattgaatatcaagaactttccctgttaagtattcacctgctacaagattgcttggtatatgtaaatacattgatgatacagcaaatattacctagaaggaaatggtaagatgtgatgttaccttaaaatttaaaagctttgactccattaatctataatcatgtaaatccatatggaaattttgacttagatatgaatgaaagaattccaatagatacttatattatttcaggacaagcataaatatatttcctcagtatggcatatgcttttcagtacatgacacgtctgctggtattactccaattataagattagatcctaagatctaagagaaattttgttaaacttaaaaagaaacggaaaatcattacttataagtacacatatgttaaacattgctgaagatttatgtgatgccttttaattatgaaatcaggaaaaataattgtgaatggaacattgtatgaattaaaaaaaatggccttttttaaatctgccttgataaaactcttcaaaatagatcactccctgttaagtaaaaatatgctgtctctttaaactctatagctgttttaccatattgatatgctactaaagctccatacatatttttattttttagattgtattatagcatttgttatatgctataaaattaactagaccactcaattttatccagctaaattcacccttttactgcattattacaattatacgactttaattatttgttctctttaagaataatgcacattttagtaattaagccaaactgtcttgacacaaaaatgtgagtatgataaagtaaacttacttactagtaagtaagtttactttatcaaaggagagtacttatatgtctagcaaaaaagatgacatcatttctttagctgtaaccttgattaagaaaaaaggattcctcgcattaagctatgataatatctctaaggagatgaatataacaaagacggcaattcattattactttgaaaagaaagaggatctcggcattgccgtatgtgaaaagttgcaaaagggattagtacaagattatgaaaaaagcctaaatcaaattatgaatggtcaagatgggccttggttttttgttagctcccgaattagcacaataggcgccactgagatgtgccctatttcgagtttacaggctgactatgaggagttaccagatcgtatgaagaatatgttggagaaaatcagtagtagcgaaatgaaattatggtcgtcgctggtaaagcaatacgcttctgatgcagacagcgaggcactcgctaaaacttctctcttaagtgtaaaaggagcgttgcagtatcggcgggtacttggggattcggcgttttcaaacatgatgcagtctattcaggaccaatttttcgaatcattaaatcgtatgaggaggtgttagaatgaggagagtcgttattacaggttatggtgttatttcgtcttccggtaatgatgtggatactttttggagtaacattgtcaatggaatatcgggaataagagaaataactgatccctcgttttcgaatattgcatctcgcattgccggatatataaatgattttaacccctatgaatatttcgataaaagagaaataaggcactatgacttatacactcaatatgcatttgcggcagcaaagcaagctattgacaatgcaaatgttaaggaaggtaactttgacacaagtcgtgttggtatttatgttggctctggaataggaggtattagcacagtactaaatagccataaggcttatttggagaagggtacacgccatgtgtcaccattcatgattcctatgatgattagcaacatggcttctggtgttatagcaataaaaactggatttaaagggccgagtttttctccggtgtccgcgtgtgcaacggctaatcaagctatcggagaagcatttttaagtatacggcatggatatacagatgcgattattgcaggtggctcagaagcccctattaatacgcttgcgttttcaggtttcgcaaatatgaaagctatgtcaactaataatgccaatccaaccgaggccagccgtccattcgataaactccgagatggatttgttatgtctgaaggtgccggtattctattcttagaagaattaacacatgccaaaagacgtggagcaaaaatattgggtgaaattattggatatggttctactacagacgcttaccatattacttcgccagactaccatggcgcggcacgggctatggagatggcactggagatggcggatatttcggcctctcagattgactatataaacgcccatgccacaggaacaaaaggtggagataaatctgaaaccaacgcaataaaagccgtatttaaggaaaacgtgaagaaactcaaaataagtgcaactaagtcaatgacaggacatttatttggagctgctggtggtattgaagccattattacactgaaagctttagaatacggcattatacctcctacaatcaatctgaaaaatgttgatgaagaatgtgaccttgattatgttcccaacaaagcgattaaacatgatagcaacttcgcgatttccaacggttttggctttggaggtcacaatgcttctcttctcttcaaaaaatggaatccagctatggaatattaaatccaataatatttaatggtattcactaacttgttgtttcactgttatattctggatatccgtaatgtagataagacgctttgctgagttgcaaaaatatgtatagattacttttgcatccataatttagtggtaagaacaaagcacatttatactttgttctatttttttatgcttaagccaatattagcaatggcgttatattagttaagaattcctaatactttagataaagtaataattttaatattaaattttattattaatcaaattaaagaaataataaagttggtattcctattttaaatatttggccatgaattttcttgcttgggcaaatatttaaaacaaagatatgcaagttacttttccctgagtgcatataccatacgtaaagtagagttgttggcggtacccctgatattaaatttctcttataggggtagtaaccgcaaaacgcggattttatacgttaagacatatatcagtattttaactattctaaaatatattttaaacatattccttaaaaataaaaaaggtaggatttgagtcacactatatgaagatagcgaattaacccaacttcacattatgctaagaataattataatattttacaaaatacgattcactatcaaagatccaatttatcaaaactgtcagctgattttttataagccagcaaggttattgctgtatataggataaggcccagaaaaagtactgggatctgctttatctgtttttcgatgcttacactatcacaataatctcgcatataaggaatgacacgaagcattacctctgctattacgatataaataatcatcatagtggttgacttgaaaaatggtactccgattttataaccactcttataatattgcgtaagaaaaataaaattgaacaagccaagcatgataaatgataagcctatgaatgcaacatttgcttcaatccctacctgattattcataagaatgaatttatccctgataaaagcaaatggaatgcaggcgataacctgtgccagttcaatacaaaccactagataaaatctcgcctttacgatatcccttttccgaattggcaatgccatcatataatatacatcacaattttcacggtttacttggaatacaaagaaaattcccaaacaggtgtaaaaaaatgtgacataatacgggtaattgggaatacataaaagtgcacttaaacttaagaaaatatatgcaataggatgcatcgaaagtttaaactctttatacattaactctttcactgtcgtcactccttttcaatgtaaatcattatggattccaaatcagctggtaaaatttcaacatctccatcaactggcagattttcagtaaaaatcagtccgcaaaaaccatccgcgtgctttttaaagcttatcaattttttactgattgcctcagtgagatgatctgatcttccttttacaatcttgtaagcgtccagaaatgacttcttatccgtacttgcaacaatctctccattttttatatatgtaacatatcttgcacatttttccaaatcagatgtaatatgggtagaaaacagtatacttatctgttcttcttctaccaaagtgataaataaatcaagcaggtcatctcttgaaacaggatcaagtccactggtcggttcatcaaaaatcaataattgggcatgatgtgataaggccaatgcgagttggtattttactttcattccttcagataactcatctgcctttttctccggatctagatgaaaacgccctaagtatgattgataagccgcctcatcccatttttcataaaaccttttggtaacttctgtgatggtttttaattttttcttcggataataattgactccccctgatacaaaaccaactttctgcttgattaaaaactcattatcagaaaaatcctccccgaaaaatttaatagttccactatctgcgtgaacataattaagcaaagcttttaatgtggtagtcttacctgccccattacgtccgataaaacccataattgtcccctgttccagggaaaatgaaacattcttcaatacaaatttctcatatctcttatttaaattttgtattgataatacgtccatatgcactcctcctctatttgattttcttaattcctctgttattttgcttcctccggtttttcctgtgctacaaaaacttcttttgcaaactgtagatagccatcactctgtacaatagcaattccctgatctttatctgctagtaaaagtagcatgtcccctggttttatatcaaataaatcccttgctccttttggaattacaatctgacccttttctccaactttaaccgtacacataaattttccttctggtatctgcattggcataaattatcattcctttcagtataatttgttttattagtaagacttgtataacttattatactttttgttaagttatatgtcaacaaaaaaagagaaagcacaatcttcgctttccctaattcatatacgttatttatcaataatctttacttcgttcttaaatacaactaagacctatttatcagtatatcactatagtaaatataattctaatttttataaattattgcaatatctccctcaaaggtctcatattatctattaaattgtaatcagaactatcatcaaggttatactgaccaataaaattaatgtgttcccatccaagtggagaaacgtgtcttagaagagattcgtcaactccttctttttccttaagtttctcaactgctttaggtaagtacatggtattccaaagagttatggagtttataattatacttaaagcagtagctctctgtaactgtccttgaatatctttttcatggaacattccatatttcccaaagaatattgctctagccagtgcattcattgcctcccctttattcaatcctatctgaatttttcttctgaaatcttcgtctgataaataatccaggataaaaatagttttttctatttttcctagttcagttaatgctttagctaagctgttttgtcgtgaataggaacctagcttgcccattatcaatgatccagaaactttaccttcctttattgaggatacaggtttcaatatatcatcataattttcttttataattttagtatttatcttaccttttataactgattgaatatttctaaagtcttcttttccttcaatacaatataatttacagtctgatatatccctaagtcttggagcaaatctgaatcctaataaatgtgttaatccaaatacctgatccgtataacccgccgtatctgtgtaatgctcctcaatttcaagttctgttctatgattaagaagtatatcaattatatgaattgcatctcttgaatttgtatttataatacctactccaaatcttgaatattgatcacttacagctgaatacattgtcactcctttttctagtccgtaatgaggattataacttgcatttaaagcttcaactgccgatttaactcttaccccatcagaagatgaagtgctgccatcaccccaatgtacagcataaggttgtctatgatgataatttgtgatagctgccatagctttttccatattatcatcactcattctccaattaactacattactcatctgtttgtagcttattccttttactgcttgttccattttcttaagtcctatatttgtaccaagagccataagtgaagctgttatacatgatctttcattatcttttggttccttgttagttgaagcatggattaggttattatcaaaagctgtaaatttagaaatatctattattatatctgataaatttaccctaggtattaagctgtaaagcttagtagctaactcttttgcctcatcaggaactgctttttctaatcttgataatacaaatttgttatcttctatagatacacctttcaatttttttatattatcagacacatattttaatttattatttaataaatccaatctagcttttaaatattcttcagcatccaaagatactttaaaatcagtattttcagctttgtacttttcccattcagaatctgttatcaaatattcttcaaagggtttatgttgcttgcttccaacaattgatatatcaccagaacgaactgcatttttaagttcagtgaatactgctaattcataatatttcttatctatattaccttcttgatcatatacgtatttttcccattgattagttacaaaatctaagggagcacctttgggtacctttcttttagtatttgcattaagttcttttatagtttccattgcttttaatacaggttcacctttttttgaagctttaaactcaagaattttcagtaatctaggggtatattttctgagtgtgctatatttttcagctattaagtccaaagaattatattctttaggtctagtaatttcagatgtttcatttattgagcttacgaattcatcccaaggcataatatcttcaattgccttaaaatcaactgctgtcttaccttcttctttagctttaattattatcttaccaagatctacataattaattagacctatatttgctatctttccatttttcttcataagattttcctactcttttttaccgaaggattgcatattttttatctgaatgtcatggatttcaatagcctgatctataagttttctgcaaaagttaactaaatatattgaaagaatagaatatctttttttgtcatcaaatcttttaaaatcataggcttcataatttgatcctaatttatataattcgtcaattctattgttatgtattctgcttaaatcaatattttcaagctttaaactgcgaatatattcaattctatcagcaactgaattgaaagcttttgatgatgactttcctgatatttcacgaagccatgataatttagtttttttctctgtactttgaacatttatcaaaatatcaagacttatcttttgttcatttgatactgatgtagatattaaatcaaaaatttcattatcaacatactttctaacttcaataataatattttcaatagttactatagaaggcagcaaaactttacattttttaagttcattaattgcttctataattagatattttagattattattttttaaggctttatctattaaataattaactaaatattctctatcgttagttttaaatcttctatacccatatagttttaatatttcttctaaatgttcgtatcttgtaggttgtcgcttattgtatgattgaaattcaaaagtactgatttttaattgttctgaaatatataatattatttcagaaggtatattttcaaaatccatcaaagtccaccctgtatatctaattatacagagctgaactgcaaatcctaatttattgctagtttttctatgtttatttataacttgtatatcttcatctgaaagcataaaaaatttttctgtttcaaatgaatttgcattattgggaagcttcatatattcttttcgctctttgctagttaaaaactctccaccacgtgccatttaattcaccccttataaattaatgtttaaataaacatcatttatttcttcttgagttattccaatatatcgttttgtcacagactgtgatccatgattaagtattttcataagagtttcaattggtacaccctgcttccaggccataaagcaaaaagtttttctcatactatgggtccctatatgagtactcaactttacattatcctgtatgtccttaaatatcctccaagccatttttacacttaaagggctattgcctccttgtcttaatttaaagatatatttatcaccagatggcttatctgcatactccaaatactccaaaagagcttttttcatagattgatttataggaaaaaccttttgtttgcttgtctttttttcaattagcctaatttctttttttagttctccaatttcataaaaaatatcttcccattttaattttacaatatcgcttacccttagagctgaatttatacctacaacaaatatagtataatctcttaaatttttccagatagataattttttactgcttgaatttctcttttactttttattggatctactgttttacttccttttttcattttatcatttgccatttttatccctcgcttagttagtattatcactactataattgtactttaactaacttgttttgagtaaaaaaataagagttttatcatttaatgattaaaccctagatatatcaatgttttatgctgatgttatatacttttttgagttagaactatttggtattaattctaagtcagaatgttttgacaaagtatatttttggtaataactgtcttaacgtatattttccgcgttttgcgagcactacccgcttttgtgtagtctgaacgcagctatgccttaattcacctattaattgatttaattgtaggattatatgttcaagtttactttttttatgagtgtcataatttttattatgtaatctaatttagaaagtattttaatataaaatagatataacccatattcttatttttagtatctaacaagttattattgtagatttaaaaaatctttcttgaaattctaccaatgcttttatctgatctttgttatatttgtttaattctttacaaaccactaatttatcctcaacatcatttattctctttattattgctacaacatacccttcatatgtctctaaaggttcaaattctccaataatgtatacatcgatttcttctccatctcctgctattgtattagggataaaaccataatttaaagagtatataaaatcatgtttaggatgcttagatcctaatgatctatccactttaactttaacgagttttcccaaataagcctccatataatttcctccctgtttttatcgccaacatgaatgagacgtgtctctcaccagactaacaatagcttcgactatgcatttccaagttcccttaggcatatcatgtcccattccttcaatcaaaagtaatttagcattaggtattgtacgtgctgtatcttttcctgcttcaacaggaatcaatggatctgctgtcccatgaatcaccagtgttggaactcttaataatgaaagatattttctcctatctccattggcaaccagcgctgcattttggcgtacagctccttgcggataataacagcgatcatagctttcttcagtataccgtattgcacgttcttcttcaaaaggaaatcctttgctccaaagcttcttccacatgtgtacagtatactcaatatatgcaccacgctgatttggaggtgttgctgtaacaatctccaatgtttcttgtgatatcttaggattattcggattacctgtagatgacataatagaaatcaaactacatatacgcaaaggatgcctataggcaaaaacctgtgcaatcatgcctcccatagaagcaccacatatatgagccttctttatttctaacgcatccagcaaaccagccacatcatcagccatatcttccaatgtatatgctgtcttaattggttttccctcttgtgccgcctgatatattttactcatatcaggaataccagcagcatcaaattttgtagacaagcccgcatcacggttatcaaagcgtataacttgtaaattatgctgtgccagcatttcacaaaaatctgattcccaaaaatttagctgagcaccatttcctgcaataagtactatagtaggatttgtcctttttccaaaaacctcatattcaatttgtattccatttgtatttacgtgtgccatcgcatatatcctcctaatacaatagtataaaacgtatgtttattaatttccaattgcgttgtacttctgtatataatggtaccactctttaccatgatttaaaatatattcttcgatgtgaaaaagtatctttattagcctaaattaaattgtaaatagacttattttttctgtttaaatttttttaatatgagatacataaacatagcacacaataaaaaatgcagtcaaattaatgactgcatttttacaattattctatcaaagcatcatgaaatcgttttccctacttctacttttctctttatttttaaaaatattatattatgtgccttgaaatatacttacgtaaacgattaattattttattaagtttctttatttagcaatattaaattcccaattttgattattattattgtcccatgtacttccgtttgtaaagaccatatttaatgcacttgaagcctcataaggaacagttactgtggcttgccataaattattacctagagatgtcatactagtatcttttgtacctttccagctgtcatagccccaatgcatctttattaatgaagaattttgtaaaactcttgcagctgcattataggttacagtaatattttggccaggaactggagattgaggattaactttaattacatcattcccaggattaggcgtaggtacattattataaagaacaataatttgacctccaggaatgtttccagttattctgccatttgatacgttaagagtgcaattggcacttgccttgttagtgtaagaaccatcttttaaattagtcgctgagtcaatgggcgtgtccccgccaacatttactattaccataccttggttaccacgttctatcataatagtttcatttcttggatttctcaaatattcactttggccagccatagcattatggaatttatttacagcagctatatcactatccttccaagaattatcagatggccttatgaaaaattgaggagtaagttgtgctcttgcatctaatattgcaaatcccatttttatgttccaatcacttgtacttgaagattgattatgttcatagttatcatgactttcaacatagcataaagcttggcttgatggaatattatgatcactaaaattgatatttaaaagaccatttaagtttttgttttgaaccgcatttcttatagtagatccataggattcagctgtaatatcaaaatatgatctgtaaacctcatcattatcgccgtaatctggaagaacttcgccatataaatataggttatttctgttatgaagtgaacttaaaactctgccccaataatcagatgcccaaggtttaccagagtcttcgccgctattagtttcaatatgtttagctgaatcaaaacgaaaaccaccagcaccagcatcaatacattcatttagaaattgaatttccatatcttgaacatcggttctctgggttgctaaatcaagaagtccaccaatatctttttgagttacttgatacctatccttataatcattgcagcttccttgattgtgatatagttcacggtgttttaaactatcgtctactgaattatcccattgccctggtgagctagttgctacatgatttaagagagcatcaaccataattttaattccatattgatttgctgctgagcataaatttttaaaatcgtcgtaagtgccaagttgagcattcccgatatggaagttgcatggctgatatagtaaccaccaatcaccagccttgggagttctttgaactggagatactaaaatagctttgtaaccatcgtctttaaattcttgcagatgatcctgaatatccttgaatctccaggtaaaggcttgagcaattacaccatcttcagttttcgctggtaagttacttgttaccggttgcacattgtaagttacggcttgtacattttgaaaacgattacttataggataaaaaagtgatccactaaatgctgttaaggtaactactaccgcaagtaagctttttcttaaagaaaatattcttttcattaaataataccttcctttttttaatttttatatagttaaatgataaatattacctatatgtatatatattacatcgaaaaaccattattgtctatatagattagtttaataatataatagagtggcgataaagaaaactaatattgaacgtaaactaatagaattttacttagatatttataattttattaagataattttataaaattggaataaatatgtacaagcttatttttactcaattgctattattatcttctctagtataacaatttgtgctatttggtgtttttaactaatgtaaaacaaggcaattgtttttaaattaatctaaagaaaaggcgtaccaatagttgatacaccttataataatcttcaaaagtgaatattcaattcatttttaatacactcccgtaatattatatctattttaagcgattttttttaagttccttcaaagcctttttagaccctctttctatatctctttctagctttcttttcttgtaattagaaaatatttgatttaaatcatatccttctggatatagcttagaggctttaatctctaattttaaccttttgtggttcacactaataaattcttcattaaataaaatagttacattgttgtatgcgtctctttctttgtaaacaatggcactttccttcttgtcaatccaaagaaccttatctcctacattaaatttataaccttcatctttgtgtttttcaatattcttttcattgataattttactgtttcttattaattcataattataatttttgttttccatgtagcttctagctctttcaattacattatctgaaatacccattttctttgatatataaagagcgttactatcgcctgtctttcctatattaagcctatataatggatctaatgtgtcacgtctgaactccattgctgcattttcaaagtccgggtgctgctctgaaaagttcttaatctctccataatgagtggttgctactgttatacatcccttatgatacacttcctctaaaatagctattgctaaagccgcaccttcatttggttctgttccgctgccaatttcatcaaacagcagtaatgttgacttattgctttcccttactatataagctaagttcttcacatgggatgaaaaagtgcttaacgcattttctacactttgattatcgcctatatctacaaatatcttgttaaatacagcgatttctgtaccttcttcagcacttatatggaagcccgattgaactgcaagtgtcaatagccctaaagtttttaaaaccactgtttttcctcctgcattgggtcccgtaattatcaatgacctatattcttttcctatttcaaagtctaaaggtactccatttttaattaaaggatatcctcctttaactatttttatataaccatgcccatttagtttaggctttatcccttttatatcgctgctatattttacttttgcccatatcatatcgtattcagctattacctctatatttattttaatttcttttattttttcatatagcatttctgttaaggtagctaatattttatattcctctaaggtctcttcaatccttaattctgatagttcagaagcgtatctagctaccacatctggttctacaaacacagtgctgccctttaatgaggtttcaacaattttaccttgaactttatttttaaaggcagtttttataggcactgtatattttccatttctttgacttacaaaaaattcttgtatatactccttgttcacagggttttccaaaaatttctcaagtcttttttttatttgatcttcgcatatatcaattcgttttcttatttttttaagctctttcgaagcatttgaagctactctattccctgatattgacgtatttatttcttcttctatataacttaaatctgttatatttaggctgtaggagcttaaagttggagcatacccttccttgcccttcataaataatttaagctttcttgagcctcttaaaaagttttccatcatacttaaatcttctggagctagagatgcacctttttctattttttctatgagtggctttacattaaatattccgtcaaatggtatatgataagaagcatctaaaagtgtccttccctcagaggtttcatctaaccttctatttaccacatctatatttatacttggttctaacttatctattaaggctttacccaggccacttgcacaatatccttttactatttcttttaattcatggtaatgtagtttttctagcgttgtattatccattttgaaattccttcctcaactttattcaagtcaacgaaacctgggtagatttcacggtattaattgtaaaataaaaaagccatggatactccacagctttaattacaaaattaataaagggtaataaccccaaaagtagtttcgtggacttgtatctataaatagtaattaactccataacaattagaagtcctataacctcaattttggaattaatattaagttacctattttagatactaaacactcacaaaattacctctcttttttgaaatctacctaatattaaatattatatatcaacgtatccactttatcaacatatataataaagaaaaaagccagaaacgctttctttatattacattgatgtttcctcaattaatatataatatttttatttatatttattgcagtcaatgaattaaaaaaatagttcagatgcacaggaaataatattgctcacttcctttgaaagttcatcaatagaatactcaagatcaccacgaaaccacacttggaacatattaataattccacctgcaaagaaatttactcgtatgcgaaaggcaggtgtgttttttatgttctcaggaacatcactatcaaattccatatagttaacaaatatagttttaagtctctcaagaaattgttcagctccattggaattgattaaagttttatagaattcgaagtcttctttaagccaatttgaaacttttaaaagaataggctgtggattttgaaagaaacatttataattaaactcacctaaagattccaacattttttcaattacttcatttccaatttggtcggaaaccgcctttacatcttgatagtgtgcgtaaaacgttccgcgattaatgtctgcacgcttaacgatatcggttactgtgattttattccaatctttttcctttattaaatctgcgaaagcttctcttattagctttcttgaacgtattgcacttttatattctgcttttttattcataaattatctttagtgagaaagtgcattattcgtaccaagctctcactaaagctcacttcctttctttttatactattttctgtatataccatattaagaattcatcatataaaagcattatgatgtaattaactctcatccttttttaagatttttacaggtgcgtatcgtccacatttagggcatttcacatagaatttagtaaaagatgtaaaggaattgagttcatttccgccaatatcaaatacattaagacattttgtacgttgaaaattgtgttcttccttataccttaaattacccagtactaaaattggaactccaaaagcaaaaaaaagaaaacctaaagcaataactattacattcatttaataattacctccatgtgattttaaaaataaattcacattatttcatccttactttataaaaaattacgagtactatttacttaatgcttcttatctcatctaagtattatacttactttcttatcctcatatatctctgctattatcatttactatccatactattaatcctaaatataacataaaatctccttaaatatctattaaaatccaacaaaaatgtttaaattatataattttaaacataacctcaaaaattgattattgtttgttatattcaagattattataatacatatataatcaaagttcaacatatgtactattttgattttagttatgattttggtaaagataatgtttttgaaagggttgatgaaattgaataagttgcttaataaaagctatttatcaattgttttttgggcactgattctcacagttattttattcactatgccagacatgggcaagcttgtaagagataaaggtcaggtaacaattggtaaagaatactcatattctactgcacaaaacatacttaataaactaaatgatgttaaaagtagtgacaaagtgctagacgtaataatggtgtatcacagcgataaaaaacttacggacagtgctttaaatgaaataaaagataaggtaactaaattagaaaataataaaaacaaatataacgtaaaaacagttctcaatgtatttacaaataaagatattgaagaccaggtgatttctaaggataaaaccacattgcttgtgcctataagtataaagcaaaagggtcgtacaacagaaactattaggaatgaaatcacaaaggttatgaaaacagataaggttacaagctattctacaggttcagattttatttcagaagatttttcaaaaactatagaggctggagttaaaaaaacagagttaataactatttttctaattatagctatactaattgcagtttttaaatcaccagtaaccccatttgctacacttgcaactgttggtttaagctatttgacttctttaggtattgtattacagctagttgacaaatttaatttttctatatcaaatttcacaaatgtatttttagtactagttttatttggcataggaacggactataccatgctgcttttgacaagatttaaagaagagcttaataacggcttagatacaaattccgcaataattgtaacttataaaacagcgggaaaaaccgtaattttaagttctcttacaatacttattggtttttcctgcctcatggcctcacaatttaaaatatatcaatcagcatcagccgtggcggttggcgttgcagttttaataattatgatttttacgtttttgcctgcacttatgaagctgtttggaatacatcttttttggtcaccttttaaatcgtcaggacactcaagtaataaagcatgggaaaaagcagctactatttcaacaaagtatccatttttcgctttgattcttgtactagcagtatgtggtttaagctatttttacacctcaagtctttcctttaacaatttgaaagaaatagcttcaaattatccatcggtaaagggctttaatattgtatctaagcattttggtgttggaaaagcactacctgtaaatgtagctatagaaaatgattatagattagataaccaatacactttgtctgaaatagatgaaattacagaagcaattaaatccgtcaaaggagttaaagaagtatgcagtgtaacgcagcctaaaggaaaaaaaataaaggatttgtatattaaagatcaggcaaattctttaaatggtggattaaaagatgcagatggtggagttaataagataaataatggtttaggtgatgctgtttctaagctgcaaggagctaaagtggacacaaactcccttgataaacttcaaaaaggcgcaaatgatttgtcttcaaatatggacttaataaataaagctactaatgaactaaaaaacggcatgaatagcggagtacaaggttcaaaggatttatctaatggtattcaagcgctggatgactctataggtaagcttcaagattctactaatgatctgcaaaatgcatatactgctataggtaaaggatatgggcaagttggagaaggactaaatagccttcttccacaggttaagaattttcaaactgcatttggcagcgttatttacatgcaaagccaacttgcagcaaagcatcctgagcttaattcagatccaaccttcgttaccatgcagcagacctcgcttaagttaaactccaagctgcaagatatggtagatgctattacaaaactaaaggcaggtttggatgaagctaatagttctttaaaaaaggctaacaatggacttagccaggctcaaagtggtattggagcaatgaaatcaggttcagaagctttaagatcaggaagcttaactatggcaaataaattagcagaagcagccgatggtcaaaataaagtagctaatgcaatgggacaattagatgaaggttcgaaacagcttcaagatggccaaaatcaacttataaacggaattagtggaatttccgataagacaaagcaattgacagatggcctttcaacggcacaaaaagggttaacggatatttcaacaggtttaaatgatgcaaattcatatattgataaattacaaaagtctaaaaactcggaaaccttctttattccacaggacaaaattaataattcagactttagtaaatcaatggatatgtacatgtcaaaggatagaaaaataacagaaataaatgttactttaaacatagatccatattcagaagatgctatgaaaataactgataaaataaacagtgtagttgcagcaaaaattaaaacttcaactttaaagaactctaagttaggaatatcaggaatatcacaaatgaataatgatcttaaaacaatgtctcaaaaagactttaataagtcaagtataataatgatctgtggcatacttattgttcttttaattgttacaagagactcctggatgtctatattcataatggcttcgttggtagcatcctactatattgccatttcaatatcaggtttattatttaataatgttttaggaaaaggagatttaagctggaatgtaccttttttctcatttatcatgattatttcactgggagtagattatagtatattccttgtaatgagatatagagaaaatttggacttaccatcaaaagaggctatagtgagtgcagctaaaagcgttggtggagttatttcttcagcgggaattattttatctggaacttttgcagctatgtatccttcaggggtacctacattaatggagttatctttaactgttatactgggaattatattactttgcacagtatttttaccaatcttcatcccagctatgattgctataaaatctagtatacttaataaatttgaaaaggaagaaacttctaaggaactagatatacattctaatagaaaggtaagtaatctataaataagtaagttactatagttaaaagcaaaccccacaatggccgtgggtttgcttttttgctatatattaatttatgttttaaccaagatactttacataaatgctgggactttagggagataaaaataagaaaaatgtgcaaaaattagcttaatattatatgattataatcgaatatattcatataaggagtgatgaaatgaatttaatacaagtgataaaagcattgtccgatgaaactcgcatgagaatattaaatttacttgaaaaaggtgaaatgtgtgtttgtgaaatggaagaaatactagacataagtcaatccaatgcttcacgccatttaacaaagcttacaaatgctgaaattattaattacaacaaggtaagtaaatatgtatattacaaaataaatgaagacgttatagaaacttttccatttatagaggaaatcattaaaaagcatgcacttaatctagaacaatgtaaaaaagatttacgacaattaaaaaaatataaagaaagtggccttaactgcgatgagttaaaggaaactaaattagggggaaaataaattgaataaaacatcaaaattattttggcttgatcgttatttaactatatggattttcactgcaatggcaatcggtatacttttaggatggacttttccagggctttctactacattgtcaagtttatcagtaggaaccacctctattcccatggctattggacttatagttatgctttatccaccacttgcaaaagttaactataaagagctctataaagtttttaaaaatcccaaagttttaggtttatcacttttacaaaattggattgtgggaccaattttaatgtttataatagcaatcatatttttaaaatcatatccagcatttatgactgggcttatattaattggtcttgcaaggtgcattgccatggttattgtatggaatggtttggccgatggagatacagagtatgcagcagctcttgtggccttcaactcaatttttcaggttattttttattcagtatactgctatatatttataacagttttaccaacagtatttgggttgaatggttataaagttgatatttcaatggtaaaagtagctggttctgtagccatttatcttggtataccatttgcagctggacttcttacaaggctaatattagaacctaaaatgggaactgaatggtatacaaaaaagtttgtacctaaggtgagtccgctagcattaattgctctactttttactatagtaatcatgtttacttataagggaaaatatatagttgaacttccgatggatgttataagaattgcagttcctcttttagtatattttataataatgttttcggtatcattttttataagttataaatcaggaatagattataaaaaaacaacaactctatcatttacagccgcaagcaataactttgaacttgccatagccgttgcagttgcagttttcggaatacagtcaaaagaagcctttacggcagttataggtcctctagtagaagtacctgttatgatagcactcgtaaatgtagctctatactggagaaaaaaatattttagtaacggaggaaaataactatgaaaccaaaagtagcatttatatgcgtacacaattcctgtagatctcaaatggctgaagctcttggaaagctatttgcagctgacacctttgaagcgtactccgccggcacagaattaaaagataacataaatcaagatgcagtaagaattataagggatttatacgacattgatatgaatgaaaaacataaatcaaagcttttaaaagatcttccaaaggtcgacatagtgataaaaatgggctgcaatgtagtatgtccttttgtgctctcaaaacacacagaagattggggcttagacgatccttcaggaaaaagtgatgaagaatttataagaacggcaaaaaccattgaagaaaaagttaaggatttagctaaaagaattataaataaagaaattgaattataaataaaaagtacaatagggtacacatgaagaaatgtgtaccctattgtacttattttataatattcataatatcttctactatctgaacatctgtaagtctattctttttcataagctcatcaggaacataacgatctaatagttcctttttaataccataatttaataccttcatatcagaagcaccgtaatatcttgcaatcttttcaccaaaaccaccatctaagataccgtcttcaagggtaattacaagtttatgttcttttttaagtccttcaagtagctcttcatcaattcctgtaatatactttggattaattaaagtagcgttaataccattttcctgtgaaagcttttctgtaactgactgaccaagctgataaaaatctccaagtgcaataactgcaacatcctttccagcttttgtaacctcatatttatttagtttagaataatctgtgttatctactactccgctttctattactcccattgcaggaacgcgaattgctactgggtgatctttctgtatcattgcccacttaagcattgcaaaatattcttccttacaggttggagctaagtataccatgtttggaatgttactcatcatgccaatatcgtataacccaagatgtgtaacatcgttcattccataaacagatgctgcaaatactagcaatactgctggattattattaatgcacaaatcctgtgaaagctggtcataggttctctgaagaaatgtactatacactccataaaccggatttccaccatttgctgcaattcctgaagctaaagcaactgcatgttcttccgcaatgccaacatcaacaaactgtctgcctgcttcgttccttctttctttccaaaatccaaacactgcaggagttcctgaggtaatcgctactactttgggatcacgcttcatataatctaataaatattctcctgttagatttccataattctctgcacttcccatagaaacctttgacgctcctgtctctagtacaaaaggcattccccagtgccactgctctttgttcttttcagcaaatttaaagccttttcctttaaccgtatgaatatgaacaactactggctgctttgtatctttaaccttattaaatactcctattagctgttcaagatcatgtccatcttttacataatgataatctaagcccattgctttaaagaaattgcattcactctttccttctgtatcacgaagttctttaagattcttatataacccgccatgattttctgcaattgacatatcattatcatttactataattatcatatttgttcctgtttctgcagcgttatttagtccctcataggcttccccaccacttagtgaaccatctccaattatagcaattacattgtccgtttcatcttttacgtcccttgccttagcaagaccacaagcaagacttattgatgttgaagtgtgccctatgttaaagaagtcatgctcgctttcttctggattggagtaaccagatacttcatcgtatttttctgaattaataaaagcctcttttcttccagtaagcattttatgaatataactctgatgagaaacatcataaacaattttatcctttggtgaattaaatacataatgcagtgcaatagtcagctccacaatcccaagattagggccaatatgtcctccatgctcacttaacttcttaagcagcacctcacgaatttctgtacttaaatctttcatttcatctattgataatttttttacatcctctggggaattaattttttctaaatacatatttcatcctcctaccttgcttttatatatcaagttgactcacactctcttgcgtgatattatcatcataaacttgagagtgtactctaagtcaagagaattttaaaatttttttagggggaataaaaatgtactatacaattagcgaagtatccaaaaagattaacgtatctcctcacacccttcgtttttatgctaaagaaggtttaatgccatttgttgaacgcagtaaaagcggtattcgcatgtttaaagatgaggattttgaatctctttttatgattgaatgtttaaagaaatctggaatgtcaatcaaagatataaaggaatttatgaactggtgtatgcagggcgatgaaacaattgatcagaggttaaatatgtttagacagcagcaagaaagagttataaaacagattgctgaacttaaggaaacccttgatttaatcaaatataaatgttggtattatgaaactgcacaggctgctgggacatgcgatatacatacttccttaaagctagaagatattccagaaaccattcgaaatttaaaagaaaatatgggaaagatgtattgtcataaataataaagctataagaacttatatcttcaaaagaaatagcttgttgacaaatatattatatactactatactttatagtagtatataaatggtggtgattaaattgtcctcaataaatttgataatacttggctacttacagcataaagaaaaaagtgcatatgaaatggttaaagattttgataaatggaatcttacgaagtggttaaaaattagtaatccctcaatttataaaaacataattaaattatgtgataatgggtatttaaattcaaggattgttaaagaaggcgaaatgccagaaaaaacattatactcaatgaacgaaaagggaaacgcatattttaatgaattaatggaggaaagttcaaaaaacataggcaatgtttacttagaatttaatgcatttttagtgaacatagagaatttaccaaaggaaaagagaagagaatatcttgaaaacttcaaaaataaggcagaagaacgtagtgccttcgtggagtcagtttataattacgaaaagcagcacactgaaaaacctggctctgaattccttataatggatctatataatgaattctatcacattttacaaaaatggtctgaaaaagtttttgaccattataattagtaatctcatgtctctaacaattacttatagatatgccgtttaattatccaaattcacagtggtatatctttattgagagacatttttttcgcccaactactatacattatagtagtctattatatactaatatattttatatctttaggaggtttattttatgaataaaaaatatcagatcatttcttttatagccattgttttaggtttttttatgacattactagatacaactatagtaaatattactttacctaagatgactgaatactttaatactaatatgaatcatatttcctgggtagtaaacgcctataatctagcttttgcagttattatactgacggcttcaagattagcagatcaatttggcagaaaaaaaatattcatagggggcgtttttttattcaccatagcttcattattggcgggtatttcaaattctcttgaagtacttatatttcttcgagcacttcaaggactatctgcagcctttgttgttcctgttacaatgcctctttctgctgaaatattcccaccagaaaagagaggaactattatgtcactttggggagctttcgccggtcttgctgctgctagtggaccaacacttggtggtatattaacacaattttttaattggagatatatcttctttattaatgtacctataggatgcctttgcatatttttaactattaaattcataaaagaatcttatgatcaggctgcaagcaaaagtatagactttggaggaaacataacaatctcagctgctatgtttttcttaacctttgcactaataaaggttaatgaaaaaggctggacttcaagctttacactctctttatttgctgcttcagctataactcttataatatttataattatcgagctaaaagttaatgagcctatgctttctcttagtctatttaaatctttacaatttacaaacggatctatttctctatttttacttgggcttggtatgatgtgtggctcctattttttgtccttttttctaacgcagattaaaggattaaatgaactgtcagcaggccttatcatttcaactatgtccctaagttcaatgtttttttcaatagtagctgctatcttaacaaaaaaggttggaaagcgatttattagcgcatttggcatttttcttttatgcttctcttgctacttaaatagctctcttactcaaaactcttcaaatatagatgtcattttaagattaattattactggtgctggtacaggcttaagtatggctacactattaagttctacaattgctaatgtccctataaataaaataggaatagcttctggaatagataacatgacacgaacacttggaactgtgcttggagttgcactatttttgactatatttacatcaaatatggctattcagataactgatgcaaaaaaagctgttatccaaacaatacatagtgacactgtttttgatgataaaaccaagcttaagatgatttcttcgataaaagtatctagtgaacaaaccgttagtcttttaaaaatattaaacacaattgacaaaaaagaaacctctgtattagcatcttctccttccatgtataaagataaaatcaaggcaggttttgaaactcaaaagaaagaaataaaaaaagtagttcctactatacagcatgtttttttatcgtatactgttaaagcttttagttttacatttgaagctggagctataattcttttcccaggtgtactttttgcattgttcagtgataaaagaagagaaaaaagtaattaatattatgaaatccgtgcatgattatttgatgcacggaaaatcacaatatgtaagcttgtgcatgttctacactatcgaagccgtgagttacttgtaaatatatatatataaccttataatagtgttacatttgtttaaggtattgtgctttatatattaataaaatgtgattacaaataagaaaaggggtgtgtttttatgaaaattacttatacagaggaaaaaaaattcacgcagaaagaaattcagaatttattcttatctgttggctgggtgtctggcaattatccaagtcgattgtataaagccttgataaattcttctactgttttaaccgcttgggatggagataagcttgtgggtcttgtacgagtactggatgacagtgaaatggtagccttcctgcattatgttttggttaaccctaactatcaagggcagagaattgctgggacaatgattgagattattaaagaaaaatataaagattatctgtaccttgaaattatgcctgaggaaagtaaaaatgcagccttttatgaaaaattcggatttaaaataatgccagatggtgtagcaatgcagctttgcaattttaataatcaaaactaataaatacataaaagattagtcttaaattttttgctcccttaatatatttaaacaaaaggagattaacataatgaatattaaaataagaaaagtatccatagaggatttaaataaagtaatagaagttgaagcaaggtgttttccagaagcagaagctgctaaaaaagcatcattagaacaaagaattaagacatttcctgaaagctttcttttagcagaaattgatggagaagtaattggttttataaatggctgtataattaatgaaaccactatttatgatgaattatttaataacgctgcactccatattccaaatggagattatcaaactatctttggacttgatgtaataccagaatatcgtaaccaaggaattgcagccgagttaatgaatcattttatagagatatcaagattatctggccgcaagggtgttattttaacctgcaaggaaaagctcattcactactactcaaagtttggctttgaaaataaaggtatttcagaatctaagcacggtggttctgaatggtatgatatgcttttagagttttaaaatattattctataatcaatcaaagccttttttactgaaatttttgaagaatataaaaacttttgattgccgtaatgataaccaaaagcactcgctgtaaatagcaagtgctttttagcccataagaatagtcctatcaaactattatggaaatattatcgataattgcatgtgtttagcaaaaatgtcctgaaccataaacatagaagtatttaccttgaacaaatacatagtaccatccatttccgtaatactgatacgatacctctgtcttttgagctacacttccagcatatgtatcagaatatggctggtagtataactcagtatcggcatagatatgaccattatgccagctatctcttggagatactgaaagtttagttgttttagtgttattaattttagcagctgatgaatttactgctggtattaaagttaatgcaatagctcctgtcattaccagacttaataactttttacgcatgttatcatccctcctcaaatttagcttgtactattttaaacgcaacaagccttatgtaatattttacataaaattatagtttttttcctaattcatcctgctgccatattatggtaatatccgtaattaattgccatttaaagcgtttaattgttatatgtatatttttgtaattaattactttaatttactcgcgtttttgccttttataacaataattattcataaaattgtcttagcccgatttaataagtcaaataaatttaaaaatattatgtactaagtcactaactatataggcttttcatcattattataatccttaattaagtaaaaccgtctattttattaaatacccttatgactaaaaccacccatccccttatatccttaaactaatctattactactgatttattgttaatatcaagagttgaaattttgcagtttccacccaaattatcctgtactgtttttgctaaagtatctagagcatcttcaaattcctttactcttgtttcatcaattagctcaatgcataaaaatgcgttctttgtattttccgtaagcattgtccttactgattcacgccaattaaaacacctgcaaattgctccctcattatccttatatactatttcaccttcatacggtggctcatttttatctgttcctaatgtaacaaaactttcgtttcctactgccttagttaatcttatatctccagcaaaggcatctatatcttctcctccgcaaggcatggcgtatcttaaagaaatagaattataaatatcaactaatggattaatggttcctatatgatttcctttatggaccctttttaataatgcctcaatagaagatcttgcacctttctttgttttgaatttttgaaaagcttctctccacacttttatgacttcattactgctaaactcttcattttttaaatatgataaagcttcttcttccgaattggaaatcatgtctttatactgattttcatcttttatagagttatctatgctgtggcaaataacaactccaatctttgcgttaggaaataagctccaaaactcatcctcaattacaaaacttttcatttaaaaaacctccttaaaattataatatcttattcaactattatactccataaatgagcaataaacccattatatataataaaacacctaaaaaatttatggtagctgttaagtcaattatatattttagctctaaattagcatattaaaagtcacatattagaaggcaattccaatatgtgacctctttatctatgctatcttaattatatcctaaagcagataagtttactaaaatgaactaaacttgaaataatcaaagtctgcataaccactggtatcagaacctgtagtgtaattgaataaagcaaatctataccctacaaaccataatttataaaagaaatccatttttaaagtgcttccaagctgtgtccagctgttaccattgtaactataatagaattttgcagtttgcgcattacaatcagtacttaccttaagatacactatattattagtaagattaatagcagtttctgatcctgtaacattgtattgaacaagcttctttgttccattatcgtttctaactcctatatatccatatttactatggaaagcagataatcctgaaatctgaccaggtttgatgttagttgtatctagcttaacccaacctgaagaagctggtccttgtatcctctgtgtaagagtatttcttgcttgaagaaaatccttagaatagcttgttttaagtctcatccaacctggacgttcagaggtagtccattttgaattatctggattgtgattccactgccactgagaaagtacatacccctgagaggtaaagtcatcatcagttccaggcgattttatcccatttcctgctgcaggtttattatatatatttggtactgtggcacttccatttacacctatcataggccaattgtttacccaagtaactggagcaagctttggtatacgaccaactgcccctttatcctcaaataacattgcccaattgtagctgccatcatcaaccacacaaacttgatgatttgcaccatcatctaaaattatagtttgctcataagggcctgtaagactttttgatctccaagccttttctatacgctgataagctccatttccctttataggtgttgaaagtatataatagtatccatttttcttaaaaattctatttccatcatgactaggaccaccatcaaaaattttctgatttattcctccatatttaacagacttacaatctggagttagttctgttacattacaccctccatttataagatatactcttccatcagtatcaaagaaaagatctgcatcatgagcatagcctatacctgaaattgctgtaaaagtccaaccaccaaagcccattggaccagtttttgtacatacaaatgtttttcctaaatcaagagaggcaaatgtagcgtaaaaagtaccgttatgatactttaaacttggagcccaacagccttttgagtatacgttttctccacctactaaattgtaggcatctgcatgtgttttatcaattccactcattcctgtatctatacgatcaaaggcataagaacaaatttcccagtttacaagatcctgtgattttagaataggcaggcctggcatataatttatactagaacatgccatataataggttgaacctactttaataacagaattatctggataatctgcatacataacaggattttgataagttccattgcctaaatctgaagtgtaggctttagctaaaaatgattttgctgctactgccatacatattaatactgctatacaacctaatttcttaaatgaaaattttcttttttttaacataataatctactcactctcctttaaaaataaaagctcatactcaaagtattcttatctagttgatacagtttttgtaccattaaacttccaccaattaacattaaataaataaccatttcctccagtaaattttagatataaatcatgtatacctttcgctccgcttacattacaagaattagtaacccaagattgccaaccaccagtactattaacatggcaagttccaataagtgttcctgatggactatcaagatgaagttcaatgtttcctccattagttgctgaagctactcttgcattaaaggaagctgcaccagaatcaaagtttacaccttttacttttatccagctgttattttgtatattacatacatccattccaccttcactgcacttttcagtcttaacatttgattcccagcaaattgtttcagcttcattttgggtgtatggatttaaattaccaataccagaaacacctgtagtcgtcatatttattgtaggaaacgtaccatcggcattatatttaaattgctcaatacacactgaacgtgtaaatccactacctccaggcaaagcaccattatgataaaagaaataagaattccctttaaaatcgattacacctggatgatttgtaaaactgcgaccctgagaaggcataattactcctttataataccatggtccagtaggacttttgcttgtggaataagaaatatattcaggtataccgccagctgcatacaccatatagtacattccatttcgcttataaaaccatggaccttcttcatataaagttggcctactagaatttcctttacgcactccaaagcctgctgtagttaaaggcacttgtacaatctttcctgaatatgaaatcatatcttgatttagtttaacataataaagattagggttgccccaatataaataagcttgaccatcattatctataaacactgtaggatcaatatctcctgtaccagtataagctaaaggatgtccaagagcatcaacaaaaggtccagtaggactatttgatactgcaacacctattgccattccaccacttttttgagttaccggaacataatagtagaactttccattcctaggaatacactgaccagcccatgcatcaccttttgcccagctaaatgtattgtaagctaatggtgagccattatccgtccaattaaccatgtctgttgaggaataacatcgccaatctttcatagtgtaccaagttgacccatcttcatcatgaccagtgtacaaataacaagtaccgttatataccattggagcaggatcagtagtataaagagtttgcactactgggttatctgcatgacatgctactggagaaactagagcgaaagcaagtgaaaaggccattatataagacgcttttttcatataattccctccttaaagttttacttatacattaaggggtacaaagtttaaaaaaacaatgaccccttaatttcataacattactttatattgtatattgattaatgactagctaaataagatcttaaccatttaagagctggacgttcagtaccatttgaattaactaaataagtaccactattccaagtttgaccttgcatatatccccatatagttacaccttttacattagggttttgatataaaacagggaatttttgttgatatctagcaagctgagtagcatcattacctgtcatatcaagttctgatacgtatattggtaaacctgttttagataaagtgcttaaaacagagttcattgtacctacagaaacgttatccatattgaagtaatgacattgaattcctattccatcaattaaacctttgcttttaagaacatttatgattttaacataattagctgctgcattaggatcgcctattatgccatattcattaattaaaagttttgaatgagggaaggcttttcttgcctgctgataagaccatacaatccagtcataaccagtagaaccacttccgcctaaggcatttttataagaaggttgagtgtgcagtggttcatttacaacatcaacaaaagctgaaccagaatatcttttacctgcagctgcaatccattttgatacttcagatctttgatcttgaggtgaaagatttgacatccaattaggctgctgacttccccatactaaattatgaaatttgaatggcatgtttttacttctggcataattataaataagatctgcacttccccagttataattgccacgactatattcaattgcaccccacttagttgcattttctggtgtaacctggttccagtagttactaaaattatttggaacattacctgctataatatttcctacaaatttgctgtgtgacattgcagctttagcagttcccacacctgaaattgaaagggcaagacctaaagctaagactcctgtacatatttttgctaactttgattttaacatattatcactccttaacatttttttaattttaaatattacacggctgttagaaagtctaagccgcctgcgttactaagtgttaacgtgatacataaacacgatatccactggtattgtttgttcctggtattgatacgttaatggttccattagatacagtatatctttttgagaaaactgtatttgtaccatttacaggagtatccttaccattccaatctaccttttctactttgacagtggcactagaaccaataaaggctgggatatttttaatatttacattaacagttccatcattaactccacctaaaagtacgcttatatatttcgcatttgaatcaacacaagcaaaaccatctgctagattgctattatcattttgaggtattacattaaccatgttacctgtcatatcaccataccatttataaaaccaccatccagcacccttttgagtgtcagatgccataagacttccaagtcttcccggtgcatttgtccaccaccaagaaatgcaagcagaatctactttgttacgttcgaattttgcaataaaaggtgctgatgcgcctggttgtccttctgcataatgattgctatcagaatattcatttattgcaatcttcctttctggtattcctagtgatctttctaatgttttcaaatctctaatgttcccagaaatattttgacttcctccaagttcatgccagcaaattacatcggggaggcagttatttgctctgcagaaattaagaaaagcattcatattataatgattatagtaagaataagatggtcctataatctgagagttcggatctaaacggcgtattaatttataagtttgaagccacatatcattaaagctaacattattatttttaaaggtaccatctggttcgttccatatttcatagccataaaaattcgaatatccggaagcctttttttgattgattacactagtaactttaccaagccaatcattcatatttgtaaaaccatacggccacctaggaaatatatctgctaacctaatcataacttttccggtggtatttttaagtcttccagctgtaggaatagcagcaccaataggttgctgatggttaaaacctgccaaagctggatttgtgaaaacatttggttttagtggtgcaacaaattggttaatatcaaatggcttactttctgtaactccataaagagaaccactagcacaatgtgttacccctctaagcgtagccctacaatccacagtcaaagtagttgctgcaaatgctttagattgaaacgctccgcttaatgataaaatagttgttaagattaatgtactactaataaatctttttttcataattaaaccttctccttctgcttgtgaatggtaaataatcatagaaaatgcaactacagataaaactatttttttaatctttaagccaccttagttgttagtaggctcaaatacccataattgattagcatttcctccataagtccactgacatacattagtgccatcagcagttccaaagttataatcatctaataccttagatccattactactcttagttgcaacagaatattgaccatttttagaagaagcttttacagcaaatttttgtgaatctccgctgtatgcattaaaaatttgaatattacttccatccttattttcaccatagctaacatccagcatatagttacctaaagcattttttaaagtaatataaccatctcctgtatttgttaaataccatttttgtccagcaactcctgaacctgaaccaagctcaacattttgtcctgcttttcctgtattatttgcaacttgaaggtatttttgagcattaatatttttaatgtagtaccatccattatttaaagttacagtacttccaggagtaggattagttgtagggttagttgtaggcttagtagaatttaaatctgctacaaatgtagttacactttgagctggaagtgatgcattgaatcttccattagctgcatttatattagaatttgttttagccatatttaatgttcctgaagttacccatgaagacacattagataccgtactattttgtatattaaagctttgatttactggatatgttcctttgtttattgcaacaataaccactttattatttcctgtgtaggctgacacataaacattacctactggattttttgttgcatcaactcttacatatccaggacgaacaaacttggagaaatgggccatcatgtagccacgtttacttatagcaccattctctttgatcaatccataggatcttcttatataccaccatacatacgcttggaaatcgccttctaccatagcattgtttatatgatttgcaacctctaacgcttcaggccagcgatctgctgaattagcatcactgtttggaacatacacttctgtcatccaaagatcttttcctgctgctttttgtttaaaaagtggataaggaaaatctttaacttgagtaccataagtgtgagtcccaaggatatccatgttcgcaagagcttttggatcatttaatataggatcgtacatgtttttttgataagaaaatgactcaggtgacattaccctgcagttaatacttcctgcatagtctctcataaaacgaagtacttcctgtggtgtccaccaagtccaatcgcgcccataatcaggctcattttgtacagaaatagcatacaaattaacaccattattcttcatatatgatacaaaatcattaagatatttagcatagtcaccatatttatcatatctaaggcgttttgctttttcaccatttctattaaaggtttctgtcatagaacttggagggttccaaggcgtagcaaagactatcgatccatgtgcaatagcacttttagctgttggtaactctttataccaattgttcttattatcatctacaaatattcttactacagaaagacctagttgattatttccatttccaaaggctgtttctctttgagctgctgtcaaatcaccagcccaagctacagaattcattcctccaaaaccacgaattacttgcttttttgaggctaaattaaccataacatttgaagctgctttaatggatgtaaatccatctgtaaatggtaaacaaatcatagaaaatgtaactacagataaaactattttttttattttgtttttcaagctttaagccctccctttagttgttagtaggctcaaatgcccataattgattagcatttcctccataagtccactgacatacattagtgccatcagcagttccaaagttatagtcatctaataccttagttccattactgctcttagttgaaacaaaatattgaccatctttagaagaagcttttacagaaaatttttgtgcatctccgctgtatgcattaaagatttgaatattacttccatccttattttcaccatagctaacatcaagcatatagttacctaaagcactttttaaagtaacataaccatctcctgtatttgttaaataccatttttgtccagcagctcctgaacctgaaccaagctcaacattttgtcctgcttttcctgtattacttgcaacttgaagatatttttgtgcattaatatttttaatgtagtaccatccattatttaaagttacagtacttccaggagtaggattagttgtagggtcagttgtaggattagtagaatttaaatctgctacaaatgtagttacactttgagctggaagtgatgcattgaatcttccattagctgcacttatattagaatttgttttagccatatttaatgttcctgaacttacccatgaagacacgttagacactgtactattttgtacattaaagctttgatttactgggtatgttccttgatttattgcaacgataactactttattatttcctgtatatgctgatacatagacatttgattgaggactatttgtagcatcaactctagagtaaccatttccgatgaattttgagaactgacccattacatatgttttcttataagtctcattagttctagtattatataatccattttgatctccagatatccaccaatatacataagcattcatatttccaattgtcatgcaatcatgaatttctttagctaattttacacatgtacctggatcattgccttcaagatagtgttcagtcatccagatgtcttttcccttattacgtgctaaagggtaatctctaataggagatccatatagatgtcctccaatgattgaaacatactgagcagtagtaggatcattaagagttggatctgacattgctgggttaaaacctaatgattcaggcataattattttaatagtactagataagctagctccatattgtttaaggaaatcatggaactgttgtgctgtccaagtacaagcatcataatcaggtgcccaatctggctcattttgaagagataatgcatataaaggtgctccattatcagacatatatttcacgaaagtttttaaataagctgcataagctgcataggaagaaggctttaaggatcctttattagcacctgttgttgtattattagtcttcattgaagctggtggtgtccatggagttgcaaaaacaatacctcctcttgcacgtactttttttgcattagaaagctcatcagcccatgccctataatctcctctgttccagccttcatttggagcaatacgtactctcaaaatatcgagacctgcatttttataaagggtatccatgcaagtatcgctaagagctccgcaccatgcacttgatgcaccaaatcctctaatagtttgatgtttagctgctacatttattgttgcatcatttgatgctgctttaacagaagagcctgtacctacaaaaggcaagcatgtcatagaaaaagccaccaaagatattaacgttctttttaatttaatattcatttttaatcctccgtattttaattattagtaggttcaaatacccacatttgattgttatttcctccataagtccactgacatacattagtaccatcagcagttccaaagttgtaatcatctaataccttagatccattactactcttagttgcaacagaatattgaccatttttagaagaagcttttacagaaaatttttgtgaatctccgctgtatgcattaaaaatttgaatattgcttccatccttattttcaccatagctaacgtctagcatatagttacctaaggcactttttaaagtaacatacccatcttctgtatttgttaaataccacttttgtccggcagctcccgagcctgaaccaagctcaacattttgtcttgcctttcctgtattgcttgcaacttgaagatacttttgagcatttacatttttaatgtaataccagccattatttaaagttacagtacttccaggcgtaggattagttgtagggtcagttgtaggattagtaggattagtaccattagcgctaaactgccaatagtcaaaattaaataaatttttactactatttcctgtaaacttaaagaagatattgtgaacaccgctaacgctctttacgttacattgcatctctttccactgctgctccccacctgtagggcttacgttgagtgtaccaatgagttgtccatccgcactatctagatgtatttctatcttacctcctacagttgatgcaacatttgctttaaaggatgcggctccacttccaaaatcagcttttgatacagcaagccaatctccattgtttatacttgtaacatcaagattattactgctcaccatacttcctggtgcagtacatttttgagtcgaaatacctccattccaaccaattgtttctgcttcagttctcttatatggattaagattagccacttgagctacaccctgcatatcctctataacgttattcataagcccatttggagaatatgaaactttgttaatcataggagaacgatatccttttgtaattcccatagcttttccaagagtttgagcatggtacactacataccactgattgttaaattggaaaacagcatgatgattattaccacctactccaaagtaagttcctgggttcttaagaaaagtacccttataagtaaatggtcccataggactgttacttgtcatgtaagcaatatcaccttgaggtggagttccatttggatgatttcctgagaaattagaacaataggaataatagtatttaccattgtatttatggatacccgaatcttcaaacataaatggagaatcgattgtagctgcacttccagtagtatgaatcatatcaccatttaatttcataactctagctgttttaggatttgcaatttggccctgtgatggattattacctcctggtatacctccaccaaaatacaagtatcctgttccatcgtcgtctactagtactgcaggatcaaatagccaagcaacaccgttaactccaggggtacttcctgtgatcataggtttgccaagaggatctatccatggtcctactggactgtctgctgttaagacaccaatacttcctgcattgtttgcaaaataaaggaagaacttatctctaccatttataaccttatgtgtaactgatggcgcccaagaattagttgcccattttgccgcaccatttggacctgctactgggatttcaccattatcagtccagttaaccatatcatcagaagatataacacttattgtcttaatattgctatagtcattgttaattatatttcctctgttatcatactcaaaggcgtcacttgacatataaacatataccctgccgttataaaccatagcaaatggatctgctccaaacttctgtgtaataagtggattagaatatcccggaacctttgcaagagcatttgtaacaccagttgattgggctaaaacatcatttacattgaaatttagtagattcgattttgtgtgtgctccatttgttttaattacacttgcatatacattagacttagcaaatccaataccgcaaattagtgcaaacgttaacagaaatgcatttgactttttaaacattattttttcccccttttataaattaatgttttatgaagtctacctaaaagacttgtaattataatcatagttatcaataaattttcatctttcggtttttatttcaagtatttctcatattatgatatctttacttaaaaaatttcttttaccatttttttgtgttattatatatgttaaccatgattatatatattatgttaaatctaaaaggtttcaatcgcaatgtgcatgtacttaaactaaaacttttaatatttatgcatgtgcacaaaagtataaagaacaattattatgaattgttaaaacaggaggtaacctatgggtatattaattaatagcattatagataaactcaaacaatataaacccaaaagttatattaacaacaaaaatataacaactattgaatctgtaaaatatctagataacaatattaagtattttcactcaaacacactgtatgttggtgaattatcaaagttcgcagtaagtaatctaatcttgcaccaaactaatttcttaattatttctaaacttcaaatgccatttcctattaaaaccaataagaacataaacatagttcttataaatgaagattttacattatctatgttcaacaagattctagatattttttttcaatatcaaaatatagatactaattctttaagactactagaggtactttccaaaaacactggtttacaaaacattattaatagtgcctcaaagcttcttggaaatcctgcttatatcagcaacacaaactttaaaattctatcatttacagaaggcattaaattagatcaccccttatggcaagacgttgcattaaagggctatcagcaatatgaaagtttgcaaagtcttctaactgatgcaatattagatgcaaaaataccaatttattttaaatcaacaaacaataaaaatagatatactattgattatagtaataatagagaaggtaagttaagaccaaattctaaatctattatatataaagaaaataataaatttactatatctcgaatatggtcaaacatatatgcgggcaacaagcttttaggtcaatttatagtacttgaagcctttaagccatttacagagagtgatataaggttaatcaaacttttaagtaatgcaatttcaatagaacttcaaaaacataaatactatgagagcacaaatataaccaatgaagaattgctactattacaactacttgatggtaaaatagttaaccgtgaagctcttgatgaaaacattaaatttgcacattgtacctttaaatatcctcttaaccttataggaatcattaataaaaattctatctcatacattcagttcagctacataaaaaccttttttaaaaagatatttcatgattctatctgtgttttgtataaaggaaatatagttatagtcgctagctatgtccaggataaaaccttgtatgagacttgctttaaaaaattaaataaggttttaaaagatctagacatgctttgtggaattagtcgtccattctataatttacttgacattaataaatactataatcagtcacttaaatcaatagaactcggacgtcatttaactaataataaatttatttttttctatgattcctatattttgcagcatatcttttctctatgctccagtgaagaatcccttaaagatttttgtcacccttcaatctttaaacttatcacctatgatagtgtgtataaaacagattacctaaagaacctatatttatatgtaatgaattttaaaaaccagtcaaagcttgcagaattaatgcatgtacatagaaatactctacactacagaatttctaaaatagaagaaataatgaatgtggacttaaataatgtagatgaattttttagcatttatttatccctaaagatactagaataccttggtgaatgcttaatatgagttgaataacaaaaatagtgccctctaattaagaaggcactattcttcagtaacattttattacattactttttctataaaaacctttaatgcatctttccaatacctcatatcatctccaactgctaaacttaaatttttattttctaaagatgaataggatggtcttttagcttgtcttttatattcatttgaagagcatggctttataacactaggtatattacttaattttattatttcacatgcaaaatcgtaccatgaacactctccatgccccgaacaattgtaaactccatacttatctgtaactatcaattttaatatatgataaactatatcctcaacatttgttggatttcctctttgatcattcacaacagttacaacttctttttctttcgccagctccattattgtgtacacaaaatttttacccttatacccatatacccaagctggccttactatgaaatattttgaagaaaactcttttacaaaatcatcacccatttttttacttttaccatagacactttgaggcgatgctttgtcctcatccttaaaaggtgtatttccttcaccgctgaaaacataatctgatgaaatatgtactaatttagctcctatctcttctgctgcaatagccaaatttttagctccaaaagcatttacctcaaacgctttcttttcgtttgtttcacaggcatctacatttgtgtaggcagcagcatttacaactacgtcaggtctaattttacttataacactttttaccacataaaaaatactaaaacaaatataagcacctaaagattcacttttaatacttacaaataatggttaattacaattcattattcaataacatatttatattacaaccttttcaatgtaaaattaataccctcattacataattgacctattattacatttaatgtactatttatataacaaataacttactttggaggattatataatgaaaatacatttaaaacgattaatacctataatttgtttttttataatatgcttggtaatatttttaaaatttatttatagtaattcacccgaaaaagcagtatccctttataataaaaaatacaattataacaacaataaaatcctaaaaaaatcaactataaatgaacattcaaaattatttatttcaattgataatacaactatatacatagatattataaatagtaattttttaaatcattggaaggtaactactagattcagcattaatgatatatataatcatcaaattaacagatgtgaatgggatacattaagatacagtcctcaagtaggatataaaggaatttactttggtataattaatgataatcatgtaaagagggtgactataaacaataagaactgtacagtagaaaaattaaagcctaatttatatttatggtatcgctttgataatcctactggtttcaaacttaaaattacaaattaatactatgtatacaaaaagtacacagccatttaagtagctatgtacttttgaaattttcaaattaatttgatttaacagttgttccgcttttagtaatgttatatttaagtactatatcaagttaaatcactgtatattagaaatataatttattatttaacaataataccttacatattaaccgagaatataaatgtactaaaaccctacaatattaattaagctttatctttaatgtaataagactaattactactataaaactagcaaaaacaatccaaatggcctcataaccatctatagaaagtagccaaccggaaaataagctgccaagacctccacctccaaaaagccccaagcctattaaacctgatggtaaaccagtattttctggattaacatcaaaagccaaggtagctagagtagactgaatacatatatacccaaatccaagaaaaaccgttgcaactaaggcaatttcccaataatgaaaaaagtataaggataatgctgttataagtgcaaaaccttctcctaaaagtattatgttttttttgccatatctcttactaagctttcctacctttgttcctccaataagacaagcaaatccataaaacattattaatactccacactctaaataatctaaatgcataacatcatgcagaaatgaccctaaataggaatatagtccaagtagtaaaaatcctgatattaaggctaagggaaatattttccttcctgcaggtgtgcatattgcaattttagtttgaagaaaaaagttattctgtttgcaattaaatgatatcttctttgaatcactagataagccttttattaaaattatatccgaaatagctgcaaccacagcaaaaaaaacgaatgcacctcgccaactaatgtatttagttattaatccgcctaaacctgcgctcaagccttgtcctaaaaaaacaattcccataaatcttcccacatatatttgtctctctagttttggaattgtatctccaattagacctaaagatactgcaataatgcctgcagcaaaaaagcctgttattatacggaataagcataacagtggtagggccctaacaaacgcacttcccgcagttcctatagctaatcctcctactataattttcagcacacttgccttgctccatctgtcactaaaaaatccataaaccggttgcataactccataaggaatcatatacgaagtcaatataattccagcagtggaaactgatatgcttaattctgatgcaattggttgaagcgctggtgaaacaaaccaattatcagcagctgatacaaaccctgcaagccccaatattaaaatcaaattattgtactttagattactgttgtttatagttgtattcattttaaaactcccttttaaatttatatacatttaaacaagtaacttcaattaccattatggtatcacattctatataaatagaacaatatttaactctattaaaacaaccatataaaaggagctgtagcactaaaaattagtaccacagccccttttatattaaaaatccgtataatcatcatccatatcttcttttgaaatatgactttcaacttctttgaaatcaacaatcttaccctcttttaaaagatcatcttcactatctaaagattcttttactaacttaatattatctaatttggataatattaagttaacattatctgatagtaagtctaatttagatacaattttttggttacttaaatccttttttacaagttcaataatatatggcgtaagccttctggatttagccttttcatttaataaatcatatatttcctttggcattgcttcggcatttaataccatacgtggttttcttttatcattactcatttttttcactagatttatttttagtaacttctgaaatagaaagaagttctaatgctgtaagattaattgttctagaggtaggtttaaatacttctgaagtatcattttcaagcaaatcatctagaaatatatggttctcttctgccactttttcggtaacaaattttagtagtgtttttttaatatatggctttaataccggtgactctcctccaaaatacacaaactttaaaagtctatcagtttctttaaatgtattaaatattactggtacaagtttatccgagtaatcttgaagcatttcagtaaacttcgaagtaaaatcataactttttcctgtattaggatcttctaaaatgtatttttgttttttataattgtttattaaaaatttttcaatttgcttaatactataaaaatattgcaaaaccttctcttttctaaaagtttcaagccaacctaagaatggttctatatcgataaccttaaaactatccctcgctttaggaggcgtaagtccttcacctagtttaacacagtcaattgaacctcctccaaaatcacaaaggacagtctcgcattttgtaaatttatcactcaaattagctctaggcaatatttttataatcttatcttcttgaaccatcttatactttatagcatatcgagcaacttcactctcaattttacatacagaattattaactttaattttaataattctttccattcccatggtaagtacttttactgtatgttcacccaaaaaacgtgctgccatttggttttgtgctacactaaatttagatgctttttttagaatccaaataggaagcatcattttcatgttgtctatttcaacatttatttctttttcttcactaggattttttaaaatagcatagtatgccacagctccaagaaaattggcatatggaattatacttgttaatttatcattcatttgatttacatgagttttaatttcatgaccttgggcaaattctcctacaagataaaatttctcattttccttttcgccagtagaaatcataagtctatctagtaattcatttttttctgttattggagaaacaaacataccttcagcttttttcgaagaaatttcaactatatttgtaggaatttcaaagtaatatccatctattaaaaagtttccagtactatttccaaaatccgcattaaatctttttatattcataaactaactcctttatattgaaataagttatacttaagtatcagttaatttaatattatcatagtttttagtaaacgtaaataaaattactcttattaagtgttacttaagtaacatttaataatgatatataaaaaaagagcatcgctcatgattaaattttgattaattttaatcatgattagcaccctcttataatctatattgtaatctctattccatttaaaattaccataagaaactttgaaaaagaactttcgaaatctttaacattagatggaattccacttaattcactggcctttttttgcacatcgttaataattgttgctggatacactccaactgcatatttcatttgatattctataaaaaacttcaattgctctttactcataaaagggaaaaaccttttaactacttttttggttctcgtaaaatctttatgtatttgctttttaaatgctgctaatttttctgctgacacgttccttgcaattatggtatttaaaatacaaaaaagttctattattcttttgtgcctatataaaagctctgaccaaagcttacaaaactcctcagcacttaatgcatcatacttatcgaaaaacttcactacttccttagaccagttttctatatctcctgaaattattaataaaaaaatttcttcttttgtagacacgtatttatataaattagcacgactaaagcttagctgtttagctattaatgcgagtgtaattttatcatattgaaggctttcatataaatttattgtagcatttacgatttcactcattctgatattcttttgcttatcgctgcgtgcacgttgaaattgcatattatgctcctcacttttatttttttattaaatatatcaaatttatgttatattgacaagtgacacagtgtaatttataataaaataagttgcgctgtgttacttattttttaatttaatattctaactacagtcatagtaatggatttattagagttactatgtttttttaacgcaaaaaatgaatggaggataatggatggaagaaacaaacaaaacttcgtactggccaatgatgattgcaatatttctaggatcttttttagttagtttaggtactagtactattaacctagctttaccgtttttaatgaaatcttttagcgcaaacttagatactgtaaaatggacacttactggcttcatgctagctatgggaactatggctcccctgaccgcctatttaggagagcgttttagctataaaagagtttatttaacttctattgttggtttcatactcgcttcaatactatgtatattttcaataaatataacaacacttattatttcacgtattattcaaggcgcttttagtggtgtgattgtgcctgcaaccatggctataatctatcaagctgttccaaagaaaagacaagtatctgcaaccagtctttggagtatggcatcaatgcttgcacccgctatcggccctactttaagtggttttttaatacaatattttagttggcagtcaatatttataataaacatacctataggacttattattttaattttaggtttaaaatatataccatacttcaagttaaatgttccagagtcttttgatttcaaaggttttggctttattgttttaggaagcttggctcttctaatagcctttagtgaaggtggtgttttgggctggacatcgttacctataatattttccttagctattggagtaatacttcttggaatctttgtttatagatcattatccatggattcctcaattcttgatttatgtgtatttaaatataaaaagtatagttttagtgtagttgtatattcaattgtaatgatgagcctttatgctggaactcttttaacacctattttcttgcaaaatcttcagcacatgtctgctttagattcaggaataattttgcttccagcatctttgtgtatggcactggcaatgcctattgtaggaaaattatataataaaataaattcacgtataataattatgactggaatattattaatagctctaggctcctttgaacttacacatttgacagttactacttctaaagcctttataatagtttggatgatagttagaaacgtgggaatctcattttgtacaatgcctgtgacctattcaggaatgacagtacttccaaaggccatatctggacatggttcttcagttaacaattggctagccagacttgtgagttcactttctatggcaatatttgcttccctgcttacctcaagagcttccatgcacgttacctcacttataaaatcaggtaaagcacatatagtagctcaaagtacggggtacgtaatgggaataaacgatgtgtactttgtttcttttataataatacttattgcattaccttttagctattttttaaataatagaaaagtaaaaactagagaaactagtaaagaagtagcttaaagtttaaaaccacatttctaaagtaagttaacaactttagaaatgtggttttgttaaattcagggtatcctttaatttacataaaaaataaaagatagaccacattttatatatgatctatcttttatttttttaaaagttaacagtatagttggagccaaagttgttatcccaatattgtactccatttacctcatataccacagcaaattgaacttgctttgtaccttgtggtaccggttgacttatgccaaattcagttttttcgttattatgattagcaactacatcagtataggttttccaattatctgtagtataacgtacctttactactctatcaccatcaatatttttcacatctacatttgttgcaaaataattgttgctgctattgatatttctgtaggtttttacatcatgcacataaacagatgatagtccataagcaccatcaacatagttctttccattattattatcccaatatgtttgtccatttacttcgtatttaaaacaatatgttataggtggtccaaacgattcagaacttgaaggagttttaaatttccaaacctcgtagttatcactcggatttgtttttacataagcggcaggagaatcactccagtttttaccaccatcaagagaatagtgcacgtacacatttttttcaaaagctaaatttcgaactgcaagataaccctcaacatgacctatggaatactcgtcatctgtaattcgctgagaataataaagttggattggattagtatcagcttttgcgttaggcactacaccaatattaatgatgaaaaaggcagcaacaaaagcaataagagtaataatttttcctgctgatttgtttaacttcatagcataacctcctaaaatttattataggtgtctgcaactattttaaccgttgattcacctatagtctcatgttcaaatacagtatgacactacacaaaatcattttcaatttacataataaaccaaatctcccaatgtaaaggtgtacatttacatttttttagttttatgtatttttttcacatcactatttacgactttaaaactcaatactacataaaaatcccccatagaaggaggcttgttctataggggaaagcattgttctataacttattaatcttgttctacatcttgtccattggaattactagatgaactccaaaggattatatcataggtgtatccaaacgcaaccaaatgagcatataactttaaagcattgatgtcaaaaattattgaagctccaacaatttgatcaatactagcttctaatctagtattatttttatctattcttccattaattatatcaacactgcctacaaatggtatttgaacactaactcttagctgaaaataggagttcaatatagtttgaggatcaatatagaaactaacttctattttaaaaggacctatatctatactttgttttacaggattgcttgtccaattggtagaatatatatcctctaaaaaatcctcattagctaggttatacaaacttgatacgtttttagaaatagcgtactccataataaatctccttttatccttagtgaatagtatatagcttgtacactacatacccaatacatatactattctaattgcctgcaatatgtgaacaaaatatattaataattaagttatagtaaaattgtagaagaaataataaagtggatataaaagtttcaattggtgttttcttttatggttctctgtgttaacataatagtatttgcattaattaagaaggcaggtgacacaaatgaattctagaaagaaaagcattattgcctcactaatggttgccatgttcttaggtgctattgagggaacggtcgtaacaacagctatgccaaccattgttagggatttaaatggttttgataaaatcagtttggtattttctgtgtatttattaacttcagcaatttctacgccaatctacggcaaaatagctgacttatatggacgaaaaagagctttatctacaggaattataatatttttacttggaagtgctttatgtggtatttcctcaaatatgtacgagcttattttattcagagctcttcaaggtataggtgcaggttctatatttactgtttcatatacaatagttggagatgtgttttccttagaagaaagaggaaaagttcaaggctggataagttccgtatggggtattgcaagtttacttggtcctttcataggaggcttttttattgactatatgtcttggaactggatattctacataaaccttccttttggcatattttctttagtacttcttgaaaaaaatctaaaggaaaaagttgaaaaaaagaaaacccctatggattatcttggtatagtgaccttaactttaaccatagtaatatttttactcactattttaggtataaatgaaaatacaaaaatttcttcagctaaaataatattacctatgcttgttactgttcttttattgtttgtattttactttattgaaaaaagagctaaggaaccactaattccttttgacatattttctaagcagagtaatattgtaaatataataagctttctcgtgtctggaatccttataggaacagatgtatatttacctatatacatacagaacgttttgggctatagtgctacaatttcagggctttcccttgcatcaatgtctatatcctggatactatcttcttttgtgctttcaaaagccatccaaaagtatggagaacgtcctgtggtatttatttcaaccctcattaccttagtaagtacagtacttttttacacgttaactggtaattctcctcttattttagtcattatatacggctttataattggctttggctatggaggaaccttaaccactctcacaatagtaattcaggaagctgtttctaaggataagagaggtgctgcaacaggggcaaattcactgttgagaaccatgggtcagactattggtgtagcaattttcggagttatttttaacttgaatattgcaaaatatttatacaaacttggaattagaggaataaacgtaaacagcctatacggctcaggaaacgtacataccggtattccattggataaagttaaggcatctcttaattttggagtccataccctattttttatactgatactaatatcggttatatgtactattatgtctgtgatgctttcaaactcactaaataagaagaaaaatatgaggtgattttatgtttaaggacaatagatttgtgggtactgttttaacctgcattctaatagcctttttgctctctattacaattaaaagattctttataactaaagatcctcttacgtttttttacataggagttttactcgtagtacttacagctaatattctttactataaatgtgatgtataaaaaactgctttataaggtattgtatcttataaagcagtttttttatcatagccttatattttatttaaaaactcactgatgacttcattaactctctctggtttatcctgatttgaattatgagctgcattagctataatcttcaaagtacaattactatcttctctttcccactttctcataatctttttaatgttcccaagcctatcatcttctccgcaaattaaaagcacaggaacactcatcttaaacttgcaatcttcatgaagacacttaataagttctgtcataatatcaataaattgccctttactaatatttttaaagcattccacaatataatcttttgtagacgcctcattgccagatgctaaagaacttgcttttataagtagtttccatgggtataatttaaataagattccagaagtcttcaaagacaatttttctatagtttttagctttgctgtattttgactacaatcaattaatataagaccatacaccatattaggataacgataaactatttcctgagcgagatttcctcccattgattgtcctatgagaatcgccttatcaatattgttaacctcatacaattttttaacatcactaatcacatcctccattacaaactttcttccgttttttaacttggaggcaccgtgaccacgtacatctaaaagtattacgttataactagctggtactactttaagctgagccttaaacatattatgatcaagccctgcaccatgaaaaaatattacccacttattttcttgcccttgtatataccagtaatgaactccacaatccaaattgtaaaatgtcaactctttcattatttatctcctagatttaaatttataaattaaattcactttatcattttaaataagtcttttagtctatacattccgttttagcttaaaattattcgtacttacaaaaaacactgctaatacttaaagatttaaaatcttcccctaatgcaattaaagatattttatcaccttccataaacttagctgaattaatcatatcctttaagttacgtatagtatcaacatcttctatatgaccaccataatagtttttatatagtgttcccagattacctaaatactctttttcaagtttctcattaacactctggcctattataaattttgaatttttaaaccatggttcatatttcttaaagtgtttaattagttgattaaaagacttatacataattaaacgtattttcatttcatcatatttatttcttttagctttattaaagttttcataacaataccaactagtatatcctccagagattgaaaaagtatcaactattttaaatccctcccccttattgtcgtcacctatcagcattatagctgctccatctccaactatagtaaagccagtatacctatctttacttttatctaaaaaggctggagaaataataagagagtatgctcctttttcagttctatttatacaatctgccattcttatagcttgaagcgtactagcacattgttggttcaaaaccattacagctgcattagataacttatatttttcttgtaagtaatacggtacactaacataatcattataattgtaattgtcataacttgtatagaaaatatttcttatcttgcaaggggctacatctattttttcaaacatcttagaaagcatagctgaaaatatatttataatatcataatctttttcaacagcaatttcactcaacttagtatcccttatatatttatttgcagcttcaataacatctgatgaggaattttctaataagaaactctctgagtttaaaagtatatcttttgcagaaattatattagaaggtatgtaataatcagcgtaaagaattttagacataaaatcaccctttccttagctatacctggcatgttcatatatctcttccataatatttacacgttcataagattgtcttaaatacatattatatatatcctctttacttccattaatagcttccataaaaaatcttaactgatttacatagtaattctgtggatcaaaggaatacttcttaattgagccatcttccttaacctcaattgaaaacttaattttataatttcctaaacaagctctaaaaaaatcatgtacttttacagttgccttttcaaattttaatatatgttcaaccttatacggtaattcaaaggaggcaataaaactacttttcaagcccgatttatattctgcattagcattaaatgtccaatcacaattattaggtccatcaaattttgaacttcccttatagctttcaggtttagctcctgttataaactgcaaaaattgcagccagtaacaacctaaatcatagaacgcaccgccgcccctttccggaaatcttctataattattttcattactgttttttaatatgatacatatatcagttttaacttcctgaagctttccatattcagctgaactaaccatatccttaatagctaattgccatgggtgatgctgtatagctagtccctctaatattttaatattctttttttcatattctttaagtattaaatcaaattcatctgattttaagcacataggtttttctacaaggacatgcttatttgcatttatagcctttaatacccattcaatatgcagatcatttggtaaagcaatatatacacaatggatatcttcacaattcaataaatcttcatagctatcaaacactctatctattttatattttttagcatattcatcagctttagaccttttcctgctggcaataccgtaaatacatagattatctattgcctttgctggccctattattgctcttggcagaatagttgaacaacctatgattcccatatttatagttttaataattttcactcccttttatttgccgtttaagtataaaagattacattttgaacaaattgggcttattcctgaatttacaacttccctaatgcgtccatactgttcactgtgccatatttctgaaatacttccatctttaatgtttccaatagtaaactctgaaaaatatttgcaagatgaaacagaaccatccgcaagaatatccatcctagttgataccgctaaacaatttctacattttaagctttcaacttcagctccaaagacaaaacttttaatatcctcaatatctaaatctggttgaaatctcactcttatattccaaaccttactgcatactttcttaacttgttcttttagattttctaaactttctggactaatcttatatttaaaacagtgccaacttttattcttctttttatttgcttcttctagccaataaaagttatccttgaagtacttgtccattttacatgctgtttcttctgatatataccaaggataagccaaaaataccatgtctactcccaaaccttcaaaaaactctactagttcataaagcctgtcacaaatattgtcgttaattactgaatgaatagaaatctttcccttataaataccttttctctttaaatctataagcagttttactgattcaactacctttttaaaattcccttttcctcttattaaatcatgagcttcttcaaaaccctcaataggaataaggagctctaaattatcagatatctttattaatgagtctaagttattatcaaacattaaggtattagtacagatagcaatttcccttggatcttgtacaagcatatcggctattttatcaaattgcttgtgacataaaggttctcctccccacaaatataatctcgactttaattcttttgtctcgttaagaattttttcaaacagctttaaatctatatccctttgctgttcttctttatccatattcatgtgataaccttttttgccccattcgtaacaatgtttgcaccttaaattacaattatttgtgatcttaatccctacaatatcaggtaattttgttgcatatcgtggattgttttttctttcttttaacggaaccgatatgtttcttattgttctttttaaggtatttaaatctttagcctcataactcactcttgtctttggctgcataatttatttcacctgactttctgcttttcctattagtctatctagataatcgtcaacataattaacagcattatttctctgcttcaccaaattatcatgcataacttttaatatatctaatttaaatccaaattccttccatgcttcataccttatcccaagtcctaaatgttcccataggtctgcattaactttttcatgatgaccaaatggttcaagtaaaataataggtgttgctgcggctagtgaatctataagtgttccacctcctggcttactaattactgccttagcatttcttaaaacatcaaaggatgaatgatattcttctttgctctcaaaccttttaggcacattgggctttacctctgaaaatggtggaaatataaagttattgccttcccaagctctccaagatgggtccatcataaaatatctatgtttatttttcccatcttcaatctcatcttcactgtatgctgcaatatcaagctttaaattattttcttctaactcatgtatcttttcttgataagttcccattccccaaccaccaccatgaatcataaacctattctctcttttttcaaaaggtatagtttctcttgatcctacaggtagatagtatggtatttcttttttccttgcatcaaacaggaatacttcgtcataattttctgaataattagcattgtatttattaagccctttccacgatggtgaaggttctgaatctatatataatatttctgcattaatgggtttattatttatcctttttctatattcatctaaaatatatatccaatgaccagacattacaatgaaatttcttctctcttctcttttccaagtatctaataattgttctatcctatcactatcaatactttttcttatatcccaaggcatcctttgagcaacaagtgctacagaaaaatttttatgataagtctgcttacttaataaaatcttatcgcgcttatctttaatgatgtagctttcaaatactgctacctctgaatctactcctctatttttcagactgtaattaattattagtccaggaacataaaatcctaatccaaaacctgaacataatattgtaactttattactcatagtaccaccaccctttcaatttaaaacatttattccacttttatttagtaattgaactaaagcattaagcgtgtcttccttttcttcttcatttttatatataacagctaaatacaatcttcccttataattttttatcctttgatttttatctaaatatctattaataaacaatgtatttgaacttaaaggaatcactcccttactactgccgggtttaaaaagcaatgccttctctttcattttactaatgatttgttcataggatatatcagttgaaaaagttacattataaaatgtaaaggcgcattgaagtttaaaattagaaacatacttgtcaatgttatgttttataagactcattgattttcttgcatttatttcaactataggaacaatattaccactttttagaagcatagaatcaacacaaacatcaccataatatccatcgttgtataaccttttagatacttctttaagaatagaaaaatacccctttttgctaatgaattcaataaattctttactaggagtatacgaaccatgatatgagcttcctatatttcttacctcttgtatagataatagctccatatcaccagacctatgaataaaaaattggcacgaaaaatcttgtttcttttctaaaaaaggttcaactataaattctactgatttccctaacctttcttgtgattttatatatttagctatcctctgaagaatcccttcactagaaattactaaatttcctttccctgataccccaaaggaatcttttataataattggggactttcttaaatactttgctcctacctcgtttagttcttctgatgaattaattatttcaaaagaatattctctatttaattccctatttatattggaagaatatatttttgaatttactctccttataatattaattttgggagaatcaaatgctagtccatatttttcgcttatttcatttgattcaggaagaactgcaaatgcagacaattctgaacttttctttaataactcttttacacctgaacaatcataactttccagtaagagcttacaaatatttttatttctctcttccttcaagacatcatttgttaaattcatataattgcatgaaaaggaaaatcctatactttttaaatattctctttgtactagatctattttataccttgttattaaagtatctcctgtggagcataaaacaaaaagcagttcatccattgatttaattatgttttccgcttgattatcagggatttgtggcagttttgctaaagcattatttctccaatatttttctgcattaaattctccataataaacgcattttttcacctgccatcacctctttgaattgatgtacttagctagtgaatctattgattttaaactatccatatcaaattcatcaaagtcaatttgaacatctaattcatcctcaatttttaaaattatattaatcaattgcaatgaatcaatatctatttcattaagtaaatctttagatttttcaattttttcttttaatgaatcatcctctttaacctgacaaattatttttattagtttctctctcataatattttctcctctcattttgataaattgtatacttacacaactttcaacttatacctcctttaaaacaattttacaactttaagcccaccacaagtcaatgtattttttgtattttaatgaattattttacaatattaacatgctattcacaccatgtacattatttatacatattaataacaataaatagtaacgattcatttataaaatacaataaaataaggagctaccgttagaaaaaaactccaataaactaacaaaatagcccctttatattaatatttaatcaattcaacttttaataatcatataccttcatagaattaaatttttttgtatatttaaatcttacttacacaaaataatcctaattatgtctaagtctaataggaggtaatcccttgtttttatcattaattcctgcactaattacaataattttaacttttaaaacaaaaaaattaattatatccttatttgcaggtgttttatctggaacaattatacataatgggctaattggaggaattacagctataggtgaatacaccatgcgagcaataagtgataaagaaagtgcttacactctatcctttttcattgcatttggttctttagccgatttaatacaaatggcaggaggaatttcaggttttagcgatatagttggaaagtggattaaaaatgaaaaaagtcttttattatgggcttggcttttaagtctaataaccttctttcacagttcttttcataccattgctgtaggtactgtcttaacgccttctttaaaaaagctaaaactctctggcgaaaagcttgctttcatactttcagttacaagcactcaactaatcttgcttattcccattgcaacctcttacctaggctatatggtgacactagttacaaataatataaagcataaaggcataagtgaaaaagcctattccatattagtaaaaagcatcgcttggaactttttcccttgggcaatgcttattataggtatcggtataactctatttggtcttggctttggcaaacttaaactaggaaaaacagatgaaaataatacagaacttacaaaaggccatattgaaaaggaaaaagcctacaatacctctattgaagaatatcctgaagacagcaaaaatttaatcattcccataataatacttctctcaagtactatcttctttttttggtggaccggaagaccatatgcaaaaggctttataaatgctttagcctttgctaaattcaatgtttccatattttctggaattatgcttactttacttttaactagcttatactatatgtaccaaaaaattagtattgcagaaatagaagcgcacattatacgcggaggagaaaaggttctttctttggttatgatattaatcttaagctgggcattgacatccataacacaggatttaggaattaatagcttaataaatggaccttttattagaagcgtacccaaatttttaatgcctgccgtgctttttataattagcggacttgtagcttacgccatgggatcttcctgggcaacctgggctcttatgatgcctttagctataaatttttctattaattcctccatatcagttcctcttatggtaggtactgtttggtctggaggcgcagttgctgatgttatttctcccttagctgcaaaaatggctgacatttcctatggagaacatttaacaacatcttttccatatttaattttaggaatagcaattactatagtgtcttatcttattgttgggctaaggatatagtgcctattttcaaataaaacatagtcccttttctaccttctttcttccgtatattttccttaactaaagaatagatttaaatatatctattttgtgaggctatatatgaaaaatgaaaatcattgtcctatgaccgaagaaaaaaaagccacttcaaaaacccttgtaaatgaagcaataacactaatcaaaaatagaaatgcaaaaaagctaaatgccatatggcttgaggttacagggtgctctggaaatattatttcctttttaaatagtgaaaatccagatttaaattatgtattaaatcagcttataaacctaacttataataacaccttaatgactgctgaaggagaagctgcttttgagacttttctaaataccttaaacacagaatttatacttttagtagatggagctgtttctgccaaagaaaatggccaatataatattgttgcccactacaaagacaagcgtattacagcactagaagcagtaaaaatggcaggagaaaaagcaaaatacgtactagctgtaggcacctgtgcttcttccggtggtatttccgctgcaaaacctaatccttctttaagcaaaagcatatcggaggtcataaatcacgaagttataaatcttccaggatgtccttgtcatcccgattgggtagtaggaacactggctcatctagtagcatttggaaagcctgaacttgatgcctacaaacgccccattttattttatggatcaactattcatgacaattgtacaagacgaggatattttgaccaaagaatatttgcaaaaaagtttggtgaaaagggctgcatgtttaaattgggctgccgtggtcctgtaacgaaaacagattgtccaagaagaaaatggaatggctatgttaactggccagttgaagacaatacaacctgtataggctgtgccaatttcaattttccagatggcatggaaccatttataagatactaattttttaggaggctctcttgaaaaaaactattataatcgatcctataacaagaattagcggttttcttgaaaccaaagtagaagttactgaaagcgtaattacaaatgctgaaaccagtggtcttctatttagaggctttgaaaagatgcttaaaactcgtcaaccacttgatgctatttattttactgaaagaatttgcggaatatgttctactgcccatgctatggcatcaactttagcactagaggatgccttaaaggtttcggtcagcataaatgacttatacgtacgtgatttaattcacagctttgaatttatgcaaaatcacataagacagttttataatctaacagttccaagctatgtaagaatgtcaaagctagatcctttatattcaaaccaatatagtgattataggcttcctaattatgaaaacgaaattatttctaagcacagtttagaaagtattaattacagccgtcttgcccatgaaggtctagctcttttcggaggaaaagctcctcactcccatggtatttttgttgggggagttacaactagcatagattcctacaaactagtaaaagcaaaatccataatctcaagcctaaaagtatttataaataacattatgcttgaggatatgaataccatagcaaaatactactcagactactttaacatgggcgaaacctacaataacttcatgagctatggactttttgatcactataaagatcctgaaataagctatgtatctccaagtgtaatgattaattataaaaagcagagctttgacaaaaacaaaatcacagaaaacatacttcacagctggtatgttagcgatacggaaaatgaaaaaccttcaaatgaaagcgccgacaatattgatttaaataaaaaacaaggttacagctttataaaatctcccaattacgacggttatcccatggaggttggaccactagctagaatgatactttctggtgattacaaaggcaaaagctcctgcatggatagaaatgtcgctcgagttttagaagcaaaaaaaataatctctattatggaaaagcttgcagataaaattgagcttctaccaaactcccaaaagacatacgatataccaataaacgcttttggtgctggtctaactgatactacacggggagctttaggtcattggattaagatagaaaacaagcttataaagtactataacataataactccaacagtatggaatatgagtcccaagaatgaaaaaggggcttttggggttggtgaaaaatccttggttggaaccaagctaaaaaatgttcaagaaccagtagaagttgggagaattatgcgctcctttgatccctgcgtttcctgtgctactcatttagtaagcgataaatacagtcctatagacatcaaggtaatagtatgataaaggttattgcccttggaaacacactaatggaggatgatgggattggaattgtggttgtaaacaaacttaaggaaacgcttgagaaaaacaatattgatgtgataattggagaaacagattttgacttttgtatttcgcaaatacaagatggtgatttcatattctttgttgacgcagctttctatggcaagtgtcctggagaaataactgtaacacctttaaacaaatataaaaacaaatgctattttcaacataacattagtgctattgacatggtaaaatcacattttaaaaatattaaaggatacgttataggcatagaaattagcagcgttagctttaaatacggtataagtaacttccttaaaaatattatccatgtaatttcagaaaatgttctaaaagaaatcttaggaggtaaaactattgaggtttaatgtggctacaaagctttataaccatcaaatgagaattaattactacactttatgcatgaacacagtggtatgtcctcagataaaaaaatactataagaatttaatagctgctgaacttaaagaatcaagaagacttgttataagaagcacttttaccaatgaatatagagaacctcgaagagaattcacactagaagaactttcaaaatacaatggtgaaaacggtaaaccagcatatgtggctgtaaacggaactgtttatgatttaagccttgctccctcttggggcggtggcacccattttggtctttatgctggaaaagatttatccagcgaattcaactcttgccataaaggaattatgagcatattaacctctttgcctagggttggagccctaatcaaagaaaaaataatttaggaggcacagctaatgcacgataccatattgttaaataaaatatcacagggcttaagtgaatgttgcaaaacacaaaaaatatcaaaaataaatgaactcactgttgctgtaaataaaaagagtcatgtaaactcagaaaatctaactgattatctaaaaaattataataaggctctagtctctagtagtcttaaaataaaggttgaaatagaagatttaccagatcaaaccgctatgataagaaggttagaaggtgaagtagctgaaaactaataatatctgtttatgcgataggtgtctcaaaaataaacacaaaaaccctttaaataggctatttcatatagaagaaatatgcctaaaaaactgtattcctccactaactctagtagataacaaatataatgcaataaattctttaaatataatagaaaaagcttacaaactactaaaatcagcaaatatactagcaataaaggatacaggaggcttttatttaatatgtaatggaaaaagtagagctgctataaataccttaagacgcagaaaaatgcgccaatcaaaaccctttgccgttatgatgaaggatatctataccgtacgagagttttgtgaggttcattcagaagaaaaaaaggtcttggaaagctctgaaagaccaattgtaattttggataaaaaacctagtttaaatcttcctaataacatatcaccaaatttaaaaagtataggagtaatgctccctttctctcctatcagtagacttatgcttcaaaaggatttagacgtacttattataaccaaaagctctaatatagaactcaaaaatgaaaccgcctttaagaatttaaaaaatattgcagattacttcttaattcacaatagagaaatttctgttcccttaaaaactccagtagtttacttaattaatcatagtaaatgtgtactgaatcaaagcctatcaagccctaaaaaagctctaaataacagtttttcagataactttattgaaattatctacggcaaagaaaacacagaatatagcaaaaactttttaggcggtgaattttttattaaaacaaataaagagtttaaaatggctgcacattttcagtacgtaacgcttcaaggaaaaccaagtccacttagctctgctataagctatcttcattttttcaaatacaatcctgatagttttatagctaatacgggtatcactacaaatgctctagaaaaaaactcaaactcctgtttatcaagtatagatcatttttttgactgtatttcctctttgcttgatatagttcatacaaatacttatgctggagaagcagctcaagcgttagaaagtatagcagatgcaactacaaaggattattacaaatatagaataaaaaatgaaaacagcgcctttgttatagatattaaaaatattcttcgtggagttctaatagatatacttataaaaaaagaaaaaagcatgattgctacaaaatttcacaatacaatttatcatatcacctgccaaatggctcttatactatcaaaactttacggaataaataaaattattttaagtggcactacctttcaaaacaagcgtttacttgaagatgtatctaaaggactaaagaaggagaaccttagggtttatttcaattcaaagccatatttagataacactgaaatcctcttgtgaaaacgaaatcataaaagagatatacaagataaaaatctcttttatgattttaaatttattattaaaacttcaaaatagcttatttagttacaacatacacttcattatctgcctgcacacctagaaaaactacattcttaatatcttgaatattttttattttcaactgctccttgacccaagcctcatccttttttatttgctgtagatgattataaagtatagtaccatctaaaattatctctaccatcactcctgtcttaggcttttgaatccctaagtcctccactgttacagatgatttttcggccttttttaaaacactaagctttccatctggctctaaaagagctatttctacgtctgtaatgtaaaagatatctttatttctaagctgcattaataaatctcccatattgtattttgccttttccatatttttatatataactctccccttatttataataactaaaggttcgctgtctatccataatcttagccttatgctttttaaggttataattgatattaatatagtgaaaacactccaaacaacaatggaaaagcagctttcaaacacatcaatatgtctatctacagatgctgccgccgcaatggaaccaatggttgttcccactatataatcaaaatacgtaagctgtgatagctgcttttttcccataaatcgtgtgaaaagcaaaagaataatataagaaatagcagatcttaaaaatacaatcatgtaatgcttcaccttaagcacttccttaatagttaatactcatattattaaccttttaactttagctaaaccatatatctttgttaagtttctatgttagttttaaccaaaatataatatacaaaaaaaagcttgatttattgacataatatttcgaatgccatatactttatttgtgataattgtattaaattgtaaccacaggaggtctttctatgaaaaacgtattcaagaagattacaactgctataatagcttcatcccttactcttactttttcctttacaacctttgctgaagccttacctcaaaaaacacaaagtacatatcaagagcttcaaaatactacgaatagacgtatctatgattttacaagcgatggcgcaaaaggaactcatgaatttataactgtacaagctatgactatacttggaaacgacaaagggaataattttaaaaatcttattaaaaactatgaacccacactaagacagtactgtgataagcctgataaagatgaaaatcagtgggcctttgcatatcatttctacaatccttatacagggctaaactaccttccaagtatacttcctcagtctaaaacaacagcacttactaaattcgaagaacacgctgcaaatgcagtatccagctatagaacggatagaacttattctatgcaagaattagggcgagcttgtcattttctagaagatgtaaacgtaccttaccattctgccaatctaatagcagtattgtccacacattctcaatatgaacagtttgttcaagatcatcaaactagctatgctctaaatagcactgataaatatggaaactactattcagagaactttaatgattactgttacgatatactaaatgattgcgctaagtactcttattcctttaaagatgaagttcaaaaaagcgaatcttcttgggattcagttgccaatgtaacagttaaatatgctgaaggctatgtagcagctttcttttatagatttttacatgaggttggagaaatttaattattcagaacaaaagagagcatggctcatgcttaaattttaatcatgagccatgctctcttttttgatttcataattgtttattgtagatattcaattttcattcatactttaagttaacgttaacgtttgatgcctaccatacccaaagtggaagtcctgataaaagatttccatttaaacctaaattaatagttaaaactgcagcaagtatacctgcaataaatagtaattttttgtaccttttaaagaacatattaacaaatcctttcttatataaattttttactaaagctaattatatctctaagagcatttatatctttcatatctaaataaaaatctattaacttatacataacctttgtatttattttgctttccttacccgttaagataaaaaattcattcattatatctagtatttttttacgattattttgctcaccatataaatcaattagctcacataagatatcaccttctaagtaatacctcatattctttttagcataagttaaagctttttcatagtattcttcagctaacttcaaatccactaattccttacctattttacctatttcaaaatatatttcagataaataaacaaagttttcatttaagtatttttttgtttcaagaatcagtgttaacttttctttaattttatcattatccccaatttttatatatatttccactagatttattaaaacagctatatacttctcatatcttttttcacccatagaatctattattttgtagtataattctaaactttcatcatatctttttagctcacctaagcaagtagcaatttgaatacatacatcataatacttatccgcacttatgctctttgttgtttccttaatttttttaaagccttctaatgctatatcatactgttttaaattcatataacaagaagacatattgtaaataaaaatacagtagtattcctcactaatgttattaaagtggtttatagcaaagttacaacactttatatcatcctcatactttcccatataataatagaccattgacaattttctaagtatagaaagcataatatcactgtgtatatctccatccattattgccttagccttttcataatatagtgaactgttgtaaaaatcacttatgttacaatagtaatctcctgccaattcaaatacagctatctttttatctttaatatcccatttagctaaaaattcttcaacttctgatagcttacttagaaatataccatccctatatatacttaaatctctaagttctctaatatatctatcaagtaccttatttgcttgagtttcttcactttctaataaataatctatactttcatcaattactgtggtctttttttcgcaaattttctttaaattgtcaagcattatctttgctgcacttctagtaaggtttgctttattgtgctctatctggcttatgaggtttctagttatcacatttcctgccagatcttcttgacttagattatatttttttcttaagtttctaagcttgtctccaatagacattatctcataagtgcccatatagattctcctaactgtaattaattcactattataagtataccatacatttaatcatatatcatcatattttgccataaagttaatacttaataatatatctaattattattattattaaatagcccttacctctatttttcttcaaaatatatacaaatcaactaattttattaaatatttttactttacataattataccaagcattcttccctatatattaaaagctattattcaatactataaagctattaatttctctccttgcttacaataattgtaaaaacatataaatatatgctattatatatttggtatatttttacaattggaaatgaggtgtaagattgaaacgctcatctgtaaataaaaaaatacaattatcaaaaaaactctttcatgttttcttttttttagtagcagttttctttctaataatattcaaactcgcttacataatgatagataagtccgatgactacaaggcatattcaataaaacaatggaagaacgaaataaccattgccccaaaaagaggagacatcctcgattgtaatggagataatctagccacaagcttaagtgattatagaatagatgtagacatgaacacacttctctcttctttaaaaagcaacaaaatgacactaaaaactctttctactaagcttggaaaaatattaggggaatcttctgacgacgtttactatacgctgtcatcaaaatcttcaaatggagttcccttaaggtttgtaaatcttgtaaggcaaattaataaggaaaaaatagatagagtaaaagctttaaaaataactggatttatttattctgatgattttcttcgagaatatccaaacaataattttctttctagtgtacttggctacctaaattccgatggtaatggagcttcaggcgtagagctctcctataataaaatactttcaggaactcctggtcataaaatcgtagaaacagatgttatgagaaatcagcttccctacgggaattccgaatatacagctcctaaagccggtaaggatatagttctaaccatagataaaaatattcaactaattgctgaacaagctgctgaaaaagcattgtctgataataaagctaaatctgttacaatcacagttatgaaccctaataatggtgaaatactagccatggtgtccaagcctgattttaaccctaatatcccaaataagggtagcacaaattctaatgttaacgtatataaaaatactgctgttgaaaacaccttcgaacctggctctatatttaaagtaattacgtcctatgctgccttagctgaaaaggtagttaacgataatactatcttcacctgcaatggaagcctagaaatcaataaaaaaactattcattgttgggaaccacaaggtcacggcagagaacatttcgttgatatcatcaaaaattcctgcaacgttggctttatggaattaggcgttaatcttcttggaaaaaataaattatacaagtacgaaaaattgtttggttttggtgaaaagacaggagtagatcttccagatgaagcagcaggtatagtaagaccaccttccgaaactagccctgtggacttagctaacaattcttttggacaaggtgtttccgtaacctctgttgaatatttagcagcttttaacgccatagcaaatggtggaacctggatacgccctcatgtgatgaaggagattgtccatagcgatgataaaaatagcaaagttatagatgaacaatactccgattatgataaaaaaatgatattagacccagctgtggcaagcaatttaagaaaatatctaatccatgtagttaacgatccaactggtgttggaaaaaaagctgcaatacctggatatgatatagcaggaaaaaccggaacagctcaaaaggcagatcctaaaactggtggctatgaaaccgacaaatatatagcttcctttgcgggcatggctccagcaaataaacctcgaattacacttttaatttcagttgatgagcctgatgcggctacaaattactacgcttctactgttgctgcacctgtggcaaaagatctttacattaaaatatttgactatttagctctagagggcatatataatatatcctctaaaaagtaaaagagccgaaaccttcttctcctttgcaactatatatttatatatagtactctgtaaattaattgctcaacaaaaaaatattatatttttagtcttaattgtactttattgagctttttaccttaagtatccaaaaaaacgaccgataataagctgtttaattggatattttataataatacatccaactaaacagcataattaccttaaatatcaaatagttaagggggtgttaatatacagaagagcaaaaacatcatatttatgttgtttttgggattactatttgcttatatgtctaaatgtaacatttatgctgatactaaaagtataactctaaatccaagtgtcgctacaactctgggcaaaactgataatacttggacttttcaagttggagattacaataatgatggtgtacctgatttatacggtataagtaaacaaggaacaaattctaccgaagtacacgttttagatggtaaatccaattatcgaaaatttttacttcaaactgctataccaatagaaaagactggtgataattacgactttaaattaggcgattataataatgatggagtgcctgatttatattgtatcaaaaaaaatggttcaaacggaaaaaccgaagtacacattttaaatggtaaagataattttcattcctttcttgctgaggtagcaacggctttgccagcaactgataacaattggagttttagtattggagattacaatcatgatggaacacctgatttatactgtattaagaaaaatggtgccaatggaaaaactgaattgcatattttaaacggtaaaaataacttccaatcctttctctatgaggtaggtacaactttacctcagacagacaacaattgggattttggtgttagtgattataatgccgatggagcacttgatttatattgtataaaaaagaacggatctggagcgacagaagtgcatattttagatggtaaaagtaattttaaatcttttgcttttgaaataggaacacctatgaccccaactgatgaaaatacacaatttatattgggacaaggttctatgaatatatatgctattaaaaagcaaggtgcaacagctactgaagttcagcagcttggatataaagatacaccaaatacttctaatgactctaattctaatacttctacaaaagtaaatactgctccaataaacactaatggtatcaactggaaatcacatttttctactgcattaggtaaaactgatgatacttggacatttcagatgggcgattacaatcgtgatggcgtgcttgatctatacggaattaggaaacaaggtacaacatctactgaggtacacgtcttagatggtaaatccaattatcgaaagtttttgcttcaaactgttataccaatagaaaagactggtgataattacgactttaaattaagcgattataataatgatggtatacctgatttatactgtattaagaaaaatggtgcaaacggaagaactgaagtgcacgttttaaatggtaaggataattttcattccttcttttccgaggtatcaacagctctaccaagtaccgataataattgggacttttgcattggaaactacaataatgatgagaagcctgatttatactgcattaaaaagaatggcgccaatggaaaaactgaggtacatattttaaatggtaagactaattttcagtcatttctcttggagataggaacttctctgtcaaacacagatgacaattggaactttggattaaatgactacaataatgatggacttattgatttatattgtattaaaagaaatggcagcggagcaacagaaatccatattttaaatggtaagaataatttttcttcctttaattttgagtcagcaacacctatggagccaactgataagaatacacaatttatagtttctaatgatggagccttaaatgtatatccaataaaaaagcaaggtgcaacatctactgaggttcatgaattcggaactaaaagccaagatcatgataaaaattataataatagtagtaacttaataacctttataggtcaatatgaatctttttctcctgtgccatatagaggagcagactatcaaaatagaactattggatatggtcacgtaattcaaccaggagaaaacctatcatatcttacagatgaacaagcaagagatttactacaaagggatattcaaaatactactaatgcagtttcgtcaataacttcagggttaaaattaacacaaaatcagtttgattctttagtagacttcgcttataactgcggaattagtgcactagaatcttctattctcctaaagaatataaaggcaggaaatacttcagcagatactcttaaaacaaactttatttcttggtcttactgcaatggagaagagcttttagggctttggaggcgtagaatggacgaatggcaaatgtatgaatatagtgattataatagggactatcctaactggtaattttatttgtaattaagggagatatacaatgaagaagaaattatttttggtatcaattgtactgatattaggcatagcttctactactatgtacttaaaacataaaagtaaagccaaagtatcacttaacaataaaaccataacaaataaaaatataaatacttctaaagaaaacctcaataatgatgtatcttcacaggaatctgtggggaataaagataacactacaacttcttttaattacgcagattattttggtgagtggaccataaaaaaatctattggttcaatacctgtatctcaaatgtctaataatgacgcttcaggttatattggtaaaaagatagctatttcatctactcaattcaatgatgtagataatatagttattaaaagcccaatttatgaacaaagaaacatttcaaacaaagatttttttgctgctagtcaaagagagttaaactatattggagttaacttagactctattaatgaaattcaaataatcagcaatggaagtctctatagcaccatatatgtaatcgacaaaaacaatatattatatatgataaatggaatattttttaaattacaaaaataacttatttataaaaagagtaaacataggtgtatcctaattgtttactctttttttctatttacaatttatctattatgttatacaatatagttaaactaacttgcataacataatagcgaggtgattttattgaatgataaatctcaatttctaaaaggtactctagagggatgtattctaaaaataattaatgatgctggtgaagtttatggatatgaaatagctgaaaaattaaaggattatggcttgaataatgtaagtgaaggaacaatttatccacttcttttaaggctggaaaaatcagaacttctgaattcaataaaaaaagaatccccctatggtcctaagagaaagtattataccctatcctctaaaggaaaagaagagctgaaagacttctatgaaaactggcttaatcttaaggcaagcatagataaaatatttttagattatggagatgataataatgatgaatgaattagatgcgatgattaagaaaaattatgaaatgagcaaaaaattaaatgaagctaatgacaaagtttatactaacattttatgctatattagggtaagctctcttgatgcaaaggaaaaggaagaaattatctctgatattctcgaaatgtttttacgctgtcaagcagaagaaaaatctattgatgaactaattggcaatgattataaaagcttttgtgattcaattatagaatctgctggtgaaaacaagttttctaaagaaaatattaaagaaactttatatataattataaatggtatttttatattattaagtatcaactttatatttgattatgtgccaagagcaattaaatatagaagcatagtaaactataagcttggagtatcttttctcttaacaaccacaatgattttattaattgcctttggtatagtaaaatatataggaaaaaccagcttcaatgataacaacataagcgattctaaaaaagcaaagattctttttataattttctatgtagtaattactgtcatcttgggacttataggctatatacttagaacctatactttgttttcagctaacccttatgtaatgttagctatacttgctgtttactggatatataaattattagaaagatttagaaaagaggcttaattagctcttttctatttatctaagattgggcgcaataaaatacgtagcaaaccccactataataaaaagaacacatgaaaaaaagtacaaaagcatgtactttttatcctcacttatagttgtttccgtgaaatatataaaaaaaattataccaaacaatagaaacttctgataccaaaaagcatttacaaaaaacaataaaggaacggccttcaatagatttatggctactgtttttgattttaatgtttccatttgtcctccctctaaaaacgagtttctacctattataaatatgctacatctaacctataaattcataagttttatttttaatagcattaatttgaatataaaaagtataatgttataccctatattattgtaatgtaaaaatatataataaggtgggtatttgactatgtacaagaaacttttggtaggcgctttaatactgttaaatgtagtcttttatggatgcagcaataaatcttcaaataaaatctcaaaatcatatgccgcaagttcagtaaatataacttcttcaaaaaaacctcctcaaaataacaaaaactccataagaaccaaaacacttatagaagccttaacaaataattctataataagcttaactggaaatatagccggggcacctatccacatgaatcttatcaaggaccctaatgcttcttttcccaattactttaaggatgctgataaatatagtgacacaataatagcagtagatcatactaaatatgctaaatcaggcgtgaaaaaagctgcctcctttaaaggctcttactattacgacaaaataaagcaaaacataaatataatcgctacactctatcaaggtggtctttttgaaataatagaatatgattcatctcaaaatataaatggttattttaaaggctttgtacaaaataataaaataactggaggctggatttcagcaaaagcttcaaaagactatccctacaaagtaaaggaatatcccttttacttaactaatggaaacacttcctctaataataactctcttcaaggttattacaaaaatcaatttaatgaagcagaatcttctaacatggtaatatttaatgaagattcctcagggtttcaatttgcaatagatggcagacattcttcaaatgttggcattaatatcggaagtatttccggaaaagcaacctttactgatgcctcaaaaaaacgggctaaatacataaataatagcaatggtcttgaaatgatttttgattttcaagataaaactactataatcgtaaatgcaaatgcagtaattcaacagtatggaggcataggtgttaatcttactggaaaatttaataaaacactttataaataagataagtcataatggcttatcttatttaattctaagttcatttgccagcttttttttaacctttagcctagcacgatttattgtagccctacataccccatatttattagctatatctgcatccgtacttttatttatataatgttctttaattatacttctctcaaaagaatttaagcatttaaaaatttcgtttcctgttctaccctctatccaattatcatctagtaattcattatcttcaaaaaaacttatactattatcataaactaatatactatccaggtattcactattattacttctcgaaatggtatcctttacaagagaacttaagcggcgataaatttcataatgaaaacatttatacacgtaattatggaaactaggtttatcatagtctctatatttttttgccattattaataaagctgcaataagttcattctgtatttcactttcattatatttagagaacatattttttattttttttgagacattctcaagctttaaattaacttcctccctattaacttcctttagttcctgtacttttatatacaaacgtataaatttgtttattgaataatcttttggcttgtaagctccatacataataagatttaagtagtttaataaaaagtttttaaaacattctattaattcctgagcggcatatgtgctgccattttgataatcaagaacgtaattgtatattcttttgtaatcttcaagtttgcattctggcattttaattcctcctgcttatatacttattagccaaaaccttcccatgactataaactggctattcaatctttatttaatttaagttatatgtcaatctcacaaaataacttaaattaaatttcacttttatttttcaaaaaatttataaacaaagttacaaattattgtacggcacagtatataagtttaatgagttttgaggaacttaaaaaataaattaatttttacaaggaggaattattatgtcattaattaaaagtaaacaaatcagatctttagatgctatacaggtgaatcaaactgatgatatgcagtttgtatcagcaagtgacaaagctaacttttctgacaaatatactaaaaaggaggttgatgataagttaactgatgccagaggcgatgtgtcaaagcaaattactgatataaccacttcaatcactaacgttaacactaaaatagacgaggatgttaagactattaatgctactactgttgatcttcaaaatcagataaatacaaacaacaccactataacaaatgaaattactgatataaacacttcaataaccaaggttgatactaaaatagacgacgatgttaaaactattaatgctactacctctgaccttcaaaatcaaataaatgtaaacaacactaatataacaaaacaaattactgatataaacacctcaatcactaatgttgacactaaagtagatgaagatattaaaactattaatgctactactaccgatttgcaaaaccaaataaatgtaaacaacaccaatataacaaaacaaattactgatataaacacctcaatcactaatgttgacactaaagtagatgaagatattaaaactattaatgctactactaccgatttgcaaaaccaaataaatgtaaacaacactactataacaaatcaaattactgacataaacacttcaatcaccaaggttgacactaaaatagacgaggatgttaaagcaattaactctactactgccgatttacagagtcaaattactgtaaataacaacactcttacaaatgaaattcagacagttaatacaagccttcagaatcaaattacatcagcaattcaaggcttatcttggaaatctccagttgacacttttgccgatatagcaaaagtatatccaaatcctgcagaaggttgggttttaactgtagatgatactaacaaagtatacagatatgatgctccaacttctaaatgggtagagtttcctatacaagctccaacaacttatgttaagacaattacaataaatccttctattgacaatcaaacctccatagatactggaataagaaatgataatacaggtatttataaaactggtcacagcgatgtagtactaaaggtaaatggctgtgctcaaatttacggtgcagacaaagattacactgcagattttgttaacaatgatcttataataacttggactaacagacaattcagcctagaaacctctgatgagcttgatataacttatactcactttgaattagtataaaatatttataatttaaattacttatatcagtggagataaccttcttcactgatattttaataacgaggtgtattatgtcaaaaataaaagacaaacaaatagaatcaataagcgctaaaaaaattactgacttaaataacaaaaactttgtatctactgacattttagctatcataaacaattttagtttaaatgaaaatggtaagctattatttaatggcagcgctttaggagttcctgatttaaaagagttaaaagaaaattttattttagacccgttacaaactaaacaacttttactgccggttcaattttcaaaatacgatattagaaccctctattgcaattgtacaggctctgtgacagttgacatatacgataactcaaaaaatggatttttagtttatagctttaattcgtgtcattcaaactattctatagttaatgttcctttggaagataaaagcggaaaaaacaatttaaatcttgttattacaaatcatgatttgtttagtgtatgtggtactttaactatcaaaataacctcattatgttaggcataaaagtaaacataagaaaaaaagtaaaaaacattgatgctttccaatgctttttacttttttaatttgtaagctaaactatacttcttactatttagctccttctactataatagttttactcaaaggatcactccaaagttcaggcaaaccaactggactatctttaactttaagcgttatggtataacttccatttaagttacttaaatcaggtaatttattttcagtttgcaaaacaacctttcccttatcatctgttaccgtccaatccttctctgttattttatctccatctggatctgttgaatcttctgttatttttatatccgctggcactttagatgtattatcgacttcaaattttgctactggtttatgatttattggaactaattttaattgaagtgtgtatgaatctgatgtaagcatcgctccaaccttaggtgtaggtccatcatcacaggtaagtgtaacattataggttccaagtggtttacctacaaatactgaagccttaggcatagaagtgctatcatatattgtatttccattgttatctgttactatccaatgctctcttatactatctccatttgcatcatagctttcatctgtaaagattgcatccattccaacagaagcgtcattatttagctgatctactggcatttcttccgcactttcagtaaactgtgcatgtggagcaacattagaatttctagttgttatatattttactaaaggattactccactgtccctcaagatcctgaacctctaattttacaataaagtccttgttagaatcttgtccggatggcaattttccatcatgccaagtgtcattaaccccttgagttacttccttccattggaattttgaatttacaattccttttctatctccatcgctattttcatgatctatatcatatgacttatcttcatccttaataactacatcatactttccactaacagcatcttgagcagtataagctgtaaatataggcgtaggctttctattaacatttactgtttcattaactatagcattatccttaaacttatatgctatagtatattttccaggctttttaaattcatttatttcattattaacccactgaccatttgcaaagtctgatatacctaagtcattatccaaggctatatcgcctgtcttactacaattcacaaaatcattatcataatttaaatgcttgcaatcttgagtatatgaccaagagacatcttcacttgaactttcattataatttatataatcatctgttaaaaacatgtttgaattctgttcctctttattaagtacagtcattatatagtctccagccttacttaatgctccatctaaatctgagttatctataaacataccgcgtccatcgtttttatttataaaagaatttaaagtatccttattgttattatttccaattaaagttacatatgctttattactttcaagctcagctagagtttgagccatgctattttctttaacatcatttgctagagtatcgcccaaatttataacaaacttttcagagttttctctccaagttggtttctttaaaatatctgaaaatgatctgcccaatgttttttgaatagtatactttatctcattatctaagtaaggcgacaaatcaccactattagtagcataaaattcagcagtggttgtttgagcaaaaactaatccatctccatatctgtattctaaaatggttggcaaattcttattaccaactgcaaatataattgaattacttggataactagtaaattgagagtgtgctgcataattccctgttatagttgttttaaggttagctgtaagtattggatcttgttttactattgttattgtaggctgaaaatcacttggcgtgtgagtaagacctagaaagctgccttgccattgtcctgaatgatgtccctcatctgctgcattaaagattagtattccaccacctttagtccaagcctctagctttgagtagttttgatttaattcatcataaaagctttgagcttgatctgatggaatatatatatgagaatattgagttaattctgtacttgatatttgattagctgtaattacatccgaggtatatccttcttgctttatatcatcataaacctttgtgccactttcccatgctggttgatcttgtatgattagaacttttttagatttgtaaccctgaattgattgtattgtatagtcaatatttgatccctttaacttactttctatatacttatttagcttgtccttaaaagttgttttatcgatattcatagaattatctagagtaaccactaaatcagctttttttcttttactaagcaaattagtaacatatacattacacgatgcatgcaaatttctaccgtcattgactgctgctgttacaactgccatgcccagctttaatgcctttatgtttcccttatcatctacagatactacacttggatcacttgttgtccatgttacatctttaacagctgaatccagtggtcttaccaatgctgtaagtaagtcagtttgtcctactggaagcttatcaaccattttgtttagaactattgaattagcaagcctcgttatgctcactgtgcaagatgaacttaaattactgccgtcttgagtagctgctgttattgtaaccgtcccaacctttagtgctgttatttttccattttgatctaccgctgctgtatttgtgtcacttgatgaccaggttacacctttatttgaagcattatcaggtgtaactacagccgtaagcgtgtctgtctgatttactaaaagcttatcttcatttttgcttaaagttattgcggtggcaagtactgcatcattattatctgcaaatacttctctaaaggaacctagacttaaattaaaagtaaaaattaaaaaccatatcagaacactttttaacttttttttcattttttatcccccttatagaatgtaataataacattcttatctaatttagttttctatttttaactggcagtaataaagtttttgcattgcaatggtcggcgttaatacgtgaacaattgttatttagcaaaaattatgttcaatacaaatgactttgaaaacattttcttatataccacattatatattaatttgaaattaatgtaaacgtttcttgttacaattttctctcttaatttttaattaaaaaaactcgataattttctttgtatgtggtattatttgtgtacataagtataaaaaaaggaaagagttgaatttagcatgaatttattaaatctttttacatatgtcatacctattgcgatatgtataatacttccaatatttataatagtaacgcattttcaaatcaaatctcttaacaaagctgtgacaagctttaataagggtgatagaagcaatgccctagaaatactatcaaaattagtaaaaagtcctattaaaaatgttaaagcaaatgcctacatcacaagagaaagaatctacttctattcaagagactttgaactttctttaagagatttattacaggctattaaattaagaccaaaaacaataaatgatgtttacagctttgcacttagctatcacattcttggagagcctgaaagagcattaaaatattttttaagagcagttgaactccagcctaatgtaggtatatcctacgagaacttagcctggttttactacttaacaggcaaatacgataaggcaatagaaaactttgaaaaagctatttccatgggcagtacaaactctgtctatagaagtttaggaattacctatgccaaaataggagattataaaaaatccgaagaatatcttaagaaagctttagacgcagaacctgaaaaaccctcaactcatatatacttttcgtatttaaaaagaaagaccaatgatattaaactagcaaaggaatatgctctaaaagcaattgagcttaataaaaataattttgatggttataaaaatcttgctgaagtaaaccttgctgaggatgattatgacggcttctataaaaatcttgaaatatttttagaaaaaataaattttgtaactaatggagaagactttaatgatgaagtttatgataaagttaaagataatgaaaagtttaaggagcttatagctaaaaccaaagtaattaaatttaaagatttaggcatagaaatcgatgataaaaaaatacttaacggaaaatttttagtataaaagaagctatatcttaattcaaaattaagatatagcttcttttatgtagtattatttcagaagtctacaaattaagtttatatttagaccctggggtgtaactatagtatttaatattggtactattaattagggttatatatactagaacttatcatggtaaacataaatataaactcaattctatttatgctcctataaaattttataatataggaaaactgctaaatgtaaattatacgtttacatttagcagtttattttaaaccttcatatttttctaaatatactgataattcctaaatatatattattacgccaaaatattagataccattttgtaaaagttgctatttacatttaaatacacagctgttatatttttgacctatgctttttattgaactataataaaagcatagtaattagtaattaataatttatattattaattatcataaaatttatgatcctttaaagtaacatttttatttacttcataaattgatgttatttttttcttgatgtattgtaaaccttgttttgttttgcagtttacaatatctatctccaaatctgctttcaagaataatatctatactaaaaacaatatagacattatttttaaaatataataaatattttagaaagaagtgtatatttatgaaagtcacaacagtaaaggaattagatgaaaaactcaaggtaattaaagaagctcaaaaaaaattctcttgttactcgcaagaaatggttgatgaaatctttagaaatgcagcaatggcagcaatcgacgcaaggatagagctagcaaaagcagctgttttggaaaccggtatgggcttagttgaagacaaggttataaaaaatcattttgcaggcgaatacatctataacaaatataaggatgaaaaaacctgcggtataattgaacgaaatgaaccctacggaattacaaaaatagcagaacctataggagttgtagctgctataatccctgtaacaaaccccacatcaacaacaatatttaaatccttaatatcccttaaaactagaaatggaattttcttttcgcctcacccaagggcaaaaaaatccacaatactagcagctaaaacaatacttgatgcagccgttaagagtggtgccccggaaaatataataggttggatagatgaaccttcaattgaactaactcaatatttaatgcaaaaagcagatataacccttgcaactggtggtccctcactagttaaatctgcttattcttccggaaaaccagcaataggtgttggtccgggtaacaccccagtaataattgatgaatctgctcatataaaaatggcagtaagttcaattatattatccaaaacctatgataatggtgttatatgtgcttctgaacaatctgtaatagtcttaaaatccatatataacaaggtaaaagatgagttccaagaaagaggagcttatataataaagaaaaacgaattggataaagtccgtgaagtgatttttaaagatggatccgtaaaccctaaaatagtcggacagtcagcttatactatagcagctatggctggcataaaagtacctaaaaccacaagaatattaataggagaagttacctccttaggtgaagaagaaccttttgcccacgaaaaactatctcctgttttggctatgtatgaggctgacaattttgatgatgctttaaaaaaagcagtaactctaataaacttaggaggcctcggccatacctcaggaatatatgcagatgaaataaaagcacgagataaaatagatagatttagtagtgccatgaaaaccgtaagaacctttgtaaatatcccaacctcacaaggtgcaagtggagatctatataattttagaataccaccttctttcacgcttggctgcggattttggggaggaaattctgtttccgagaatgttggtccaaaacatcttttgaatattaaaaccgtagctgaaaggagagaaaacatgctttggtttagagttccacataaagtatattttaagttcggttgtcttcaatttgctttaaaagatttaaaagatctaaagaaaaaaagagcctttatagttactgatagtgacccctataatttaaactatgttgattcaataataaaaatacttgagcacctagatattgattttaaagtatttaataaggttggaagagaagctgatcttaaaaccataaaaaaagcaactgaagaaatgtcctcctttatgccagacactataatagctttaggtggtacccctgaaatgagctctgcaaagctaatgtgggtactatatgaacatccagaagtaaaatttgaagatcttgcaataaaatttatggacataagaaagagaatatatactttcccaaaactcggtaaaaaggctatgttagttgcaattacaacttctgctggttccggttctgaggttactccttttgctttagtaactgacaataacactggaaataagtacatgttagcagattatgaaatgacaccaaatatggcaattgtagatgcagaacttatgatgaaaatgccaaagggattaaccgcttattcaggtatagatgcactagtaaatagtatagaagcatacacatccgtatatgcttcagaatacacaaacggactagcactagaggcaatacgattaatatttaaatatttgcctgaggcttacaaaaacggaagaaccaatgaaaaagcaagagagaaaatggctcacgcttcaactatggcaggtatggcatccgctaatgcatttctaggtctatgtcattccatggcaataaaattaagttcagaacacaatattcctagtggcattgccaatgcattactaatagaagaagtaataaaatttaacgcagttgataatcctgtaaaacaagccccttgcccacaatataagtatccaaacaccatatttagatatgctcgaattgcagattatataaagcttggaggaaatactgatgaggaaaaggtagatctcttaattaacaaaatacatgaactaaaaaaagctttaaatataccaacttcaataaaggatgcaggtgttttggaggaaaacttctattcctcccttgatagaatatctgaacttgcactagatgatcaatgcacaggcgctaatcctagatttcctcttacaagtgagataaaagaaatgtatataaattgttttaaaaaacaaccttaaaccttcatatttcaactactttttataattttaataaagaatttaaaaggagggattaaaatgaactctaaaataattagatttgaaaatttaaggtcattctttaaagatgggatgacaattatgattggaggttttttaaactgtggcactccaaccaaattaattgattttttagttaatttaaatataaagaatttaacgattataagtaatgatacatgttatcctaatacaggtattggtaagttaatatcaaataatcaagtaaaaaagcttattgcttcatatataggcagcaacccagatactggcaaaaaactttttaataatgaacttgaagtagagctctctccccaaggaactctagtggaaagaatacgtgcaggcggatctggcttaggtggtgtactaactaaaacaggtttaggaactttgattgaaaaaggaaagaaaaaaatatctataaatggaacggaatatttgttagagctacctcttacagccgatgtagcattaattaaaggtagtattgtagatgaggccggaaacaccttctataaaggtactactaaaaactttaatccctatatggcaatggcagctaaaaccgtaatagttgaagctgaaaatttagttagctgtgaaaaactagaaaaggaaaaagcaatgacccccggagttcttataaattatatagtaaaggagcctgcataaaatgattaatgataaaaacctagcgaaagaaataatagccaaaagagttgcaagagaattaaaaaatggtcaacttgtaaacttaggtgtaggtcttcctaccatggttgcagattatataccaaaaaatttcaaaattactttccaatcagaaaacggaatagttggaatgggcgctagtcctaaaataaatgaggcagataaagatgtagtaaatgcaggaggagactatacaacagtacttcctgacggcacatttttcgatagctcagtttcgttttcactaatccgtggtggtcacgtagatgttactgttttaggggctctccaggtagatgaaaagggtaatatagccaattggattgttcctggaaaaatgctctctggtatgggtggagctatggatttagtaaatggagctaagaaagtaataattgcaatgagacatacaaataaaggtcaacctaaaattttaaaaaaatgtacacttcccctcacggcaaagtctcaagcaaatctaattgtaacagaacttggagtaattgaggttattaatgatggtttacttctcactgaaattaataaaaacacaaccattgatgaaataaggtctttaactgctgcagatttactcatatccaatgaacttagacccatggctgtttagaaagaaatactatgaaacaatattaaaaaaataagagttaccatttaaggtaactcttatttttattacttaagataatcatatataacttcagctctaggcaatattatatctgcaagaatgtgagagctagaaacaatctcttttactggcaaatcattaagtggcgccatagcgtgatcaaataactgcagtcgagttggtcctgtccaagcttcatgtacggtaacatctgtgattttcgcatttataagctcacatattctagggcttccatcataattgggtattattttcaacatataattagggcgacaaatttgatcctttgcttcattagcatctaaggctttatgtttgtaccccattgtagctgtcgcaactctaagttttccatagtctaaagttcctactaaagtatctgaatccacaaaaagctttggatacccgagctttttaggatatgcacttaattcccttcctactgcaattgcaggctcattatctaaatacatcatatgaagataatctcccttaactccattaaagcttacgggaatagcctgtccgctttctgtataacaaccaagtccactcgtatcatgcattgccataatttcaaacctgactaagggctcatcaatttctaaaggctctggcacaactttacgaagtgcatccatatctgtacgatatacaatgttaaaatactcacgattatgaaatttatagggtcctctaggaaatgcaggcgaagttaatggcgtgctaatttgtttaattacttcatcctttaacataaaagtcaccttcctaaatttaataatgtttagcttttctaacatactttatcttcacattataaatcgcctctagtcctatttatttatatttacattataacacatattgtttttttaagtaaatttttacaccatatattaattttttctactagctttcgaaaataaaagtacacttcctaaaaattctgcataatagatttatataaacttatgtggaggtgtttttatgaattcaggcgatatagtgtctcttataggcaatgttggctttcccatagctgtatcaatataccttttagttagaatagaaggtaaaatggaagcccttacaagctccataaataatctcacaaacactataaacaattccaatacaaaaaataaataaattggaggttttttaatgaagcctttatctaacgaaaacctaaatattttggttcttaaatcacgctctggtgataatgcctctttaaataaaatatttaactattttggcccatttataaaaagtttcactaaaaacatatatataagaaacttcgacaaaagcgatatatacgaggaatgtaacttttcaattctgttatcaatcaaaaaatgtgacataaaaaaatataacttcactgcttacaccataagttccattaaaaataacatatattataaaataagaaatcaagcaaaattccagtctgaattaagccttaacgcaaaagtaactgaccaaaactgcacttttcaagatattcttatagataaaacgaatcattttaagaacttatctatcaaaaatgccttaaccagtttagacaagaaagaacaagatattatagaccatatttactttttaggatactcttctattgagtattctaaaaaatcaggcataaattatagaacatgtcttagacgaaaaaacagtgctttaaagaaactaaagagaaagttaaattaaatggcctgtactagattgtacaagccattgatttttcacttaattatttgttgaagaaaaattatagttattactgttattattatcccatgtacctgactggtctttaaatgccatattaacattataacagccagaaggtaaagttatatttgcaagccatcttccatccgcctgttttaccatatttatatcctgaggcgacgtaaatccattacaaccccaatgtaatgttatattagaagctgaagatgctaaacttccattgtaataaactgatatttgtttacatgcctctggcgctggagtaacttgaactttagggacactgctccatgtatttaaagtccaattattgttgttattattatcccaactgcttccatttgtgaaacaaaaattcaatgtatttgatgaagcaggtatcgctatagtagcctcccaaaaaccatttgaatcctttaccatagctaagttttgcatattactccatccgttaactccccagtgcaaggatacgtttgatgaattcgctaagtttccattatagtaaattgtaaaattattacccgaaactaggttgctgctgtcataatcaactttatagcctgcatgtggaaggtaattactggctaatggtatattccaattagctccattgttattatcccaacttgtcccatctgtaaaagaaaaattaacattcttagtaacctctttaggcactgttatagttgtctgccacttattgtctccaagtgatgtcattgccttacttgttgcagcgctaaaaccgtcataaccccagtacaagtttacatttgaagcatcctttagcgctgttgttcccgcatcataagttatcgttacactatctcctgcttttgcagcttgctcacttaatgtaactctgtcgctgcctgggttactattcttgttgtaaatcactatgattgaatttgctggtactgttcctgtcattctcccctgagaaacagttaaagaatcggttgcactaccatgattatcataatttccgtcctctaaattagttggggtgtttaaattaaagctgtcgccttcatttacaataacagctcctttacttcctctttctataatcattgccttattgttattttgtaaccttaaatattcattttgacctgccatcgcgttatgaaattcattaacagctacaacatcagaatccttccagagagcatctccctcacttcctatatttcctgtaggtctatcaaagaataagggaactgaaccagctcttgaagcagctattgcccaacctgcttttctttgccagtctgttaaatctttactttcattatgctcgtactcatcatgtgtttcaagcatatccacacacttattactatcaagtccccccatgccctgcgcattagttaaatcacctgatttaattgcacctctaagagatccatcatatgcgcttgcttcaacattcataaaactttcataagctgaaatattatctacttttccatcttgaagtacctcaccataaatatatagatttgatttattatgcaaactgcctaaaacgttttcccaatagttacctgaccaagatttattagcatctaaacctaagtctgtttcaatatgcttagcagcatcaaaacgaaaaccggttgcaccagcatctacacactgatttaaaaaagtaatcgccttactctgtactgctgaactttgtgtatttaaatctggcatacctataccttcctgtgttacatcttgtctattattccaatcagtgcactgtccattatgatgatacaagcttggatctttaaaacttggatctacttcagaagcaacttcatcgtcgtttccattattggccatatgattcattactacatcaacaactatagatattccatagttttttgcttcactgcaaagtgatttgaaatcatcgtaactcccaagttgagcatttcctatagcttgattggttggctgatataatagccaccagtcagaagaattcgtactattgctttttgtaccttgaactggagacacctgaacagctttataacctgctgctgcaatactaggaagttctttttttatattattaaatgaccagtcaaaagcatgaagcataacaccgtctttggtgttttccggaagttctctattctcacttgaatatgtcattacctttgcttgtgatctaacaggattaaacacaggtccatatccaattaaaacacatattactgacagtgatagcattcttctttttaacaatttagaacgtttactcaaaatatactcatctccaaattaaaattatatttttacttactatattttgtattaagttaaatttgtcataattcaattacctccttttaatcttttattgtattttattgatataatgtaaattatttctttacattttccatcattatacaaaaattattcattatagtcaacacacttgttgcaattatttttaatcttctatcttacctaataaaatatccttagccataaaattatctctattatttcaagtttttagccctatagtctcatatttaatatcaatatttgatatcaatatttgatatcaatatttgatattgtcatttaatataaatatttatacctatgttaaacaccaatatacaatactagtatcaaaccctaatactatatattaaccccactacatgtatttttataatggtttagaattaaatgtacactttttcttaaaagtacataatagataactgtacttatttaaaacccaaattattatagaattgaaaggatgatgttttatggccgcaacttcaaccatttacaaaagacaactttctttagactatcctgcgttaaatgcaaaaggaaaacaaataacaaaaagtatcaactttaaaaatgttgataccaacgcatctttggacaatctctactttataggaaatgaaatttctaagctcttatctgttaccgtatctaatattgctactgtagacaactctactataactgcctaaaaattaaaggaggctaaattatgtcaaaaatacttaaaataaaattttcaaatgaagctggaaaaaatgttagtataaacatacctaacataaatgatggtgtaacttcagatcaaattaagaccttaacctcagatataatttcaaaaggagttttcacatcacaaaatggtgctttaaaaaaagttatttctgctaatctggttgaaactaaaactactaattttcttttataaaacaagccttgtagtatatctgcgatatttcagtattagtatttaaccctaaccctatgctttaaactaaatattgataccaagtattaattctaatagtcataattatatttacatactatacccgacactataatatttaaatgttttttaatatgtaaccccaatactaggcattgatactaaagtatagtatgtaaaattaaatatacattttttattaaaataacataatagataaatgaaaacaaaattataaaatgaaaggatgatttttctatggctgtaacctcaaatattaataaaagacaactttctttaaactatgctaccttaaattcaaagggaaaacaaataaacaaaagtattaactttaaaaatattgatactgccgcatctttagataatatctattatataggaaatgagatttctaaactcttatctgttaccatatctaatattgctactgtagacaactctactataactgcctaaaataaaaggaggtgcatattatgtcaaaaacactaaaattaaagttctcaaatgcttcaggaaagaatgttagtataaacatacctaatatcagcgatgctgtgacatcagatcaagttaaacttttaacttcagatataatatcaaaagctatctttacctcacaaggcggttcactaaaaaaggttatttccgctgatttagttgaaaataaaactactaatctacttcagtagtataaaaatattgcttaagaaatggcttaaaataattatttttatacacgaaaaatatgtaattcaaaaattacttttcatgtgcttagataagaaaaaaccaggttataacacctggtttttctttatttaaagtactttttgaggcgaatatagaatgcatttcctcatacgcccattaatgttaaataaagttgcaaatcacatttaaatgtattattatataaaaaaactaatatttatgaaaaggagtggatattttggagttattgaagagtgacaaaaataagattttaacacattttaatgaagtattaaaaataaaaaaaagaaacctaaatagagaatttagttttgataaagttgcaaattctacaataaataaaggttatttaaatggttcaaaaattgatagaattattttttatttgagaagcacaggatgcgagtggagctgtactaaaatgggtggatgttttatgtgcggacattactttggtactaatatgggagatactcttcctaaaaattctttttataatcagtttctatctgagtataataagtatgatttttcaaagtatccaatgatttgtatatataatgctggttcaatattaaatgataatgaaattccaagggaagagctttatagaattttaaatgtaataaagagaaataacgatataaagcgagttgttttggagagtagacctgaatttattaatgttgaggtattaaatcaaataagtaatatcctaaatgataaaatcgtagaaataggtattggtttagaaacatctaatgataaagttagagaatattgcataaacaaaggctttaacttcaaaaattacttagaaaaggtaaaattaataaagaattattctaatatcaaaacattaacttatgtaacagtaaagcttttatttttgactatagatgaatccatacgagacgtaatacaaactatgaaggatttatcaggattaacggatataatttctcttgaacctataagcattcagaaaaatactcttgtggaattattgtatactaataaattatatgatccgccaaaaggatggataataaaagagatattagctaatttacataatacaaatttaatgaaaaatttcgaattaagaataggaggtttcgaattttttccaataccagatttgtttataagtaattgcaataagtgcaataaaaaactttatgatgcaatagatatatataatagcacaaaagatgtcaattctattttaactttaagttgtgattgttatgaagaatttaagaaaaaaatatatatagaaaataatacagtttcacatataccattagaggaaagaatatgcaactctttagaatattttctatataaatcactttaagaatggagaatgattatgtattatataccaattttacttactataatcgcaaatgtattttatcatatttttcaaaaatctataccagataatacaaatccaattgcatcattaatcttaacttatggaactgcattagtaggttctatcataatttttatcttttatccaaaacataatggatttagtgcttcttttaaaggactaaattggactagttgtgcattaggtgcttctataattttattagagctaggctttctccttgcttatagggccggatgggatgttagtttaggcgcaatagtctctaatgttgcagttacattagtattagttcctataggaattttattttttaaagaaaatatttcaatgattaatttattaggtatacctttttgtattttgggattaattttaattaataaatagtgatttatcctgcatgaatttatgaatagctttaattattttatgctatgtttttgtattaacatttaatattagggttatatagtaatactaaaccctaatgataaatgatacaaagaatatatacctgaagtaaattaaatcttattatactaccttccttatatatttctgcattcgactctaatataaatagaactttaaaactagtaaaattgaaatttaatacgactttgagcttacaattgatataaacctttaatatagttcttaattataaaaaacatataatgtagaagtattcctacattatatatctcctaaaataatattgtaaacttattactaatcccatttacatattagaaagtaacagctatgataataattttatgttttatctgaaaatcacagtatttacaaagctgcttaagcaaacaattacagcacttatcttttctttatattctaagctatagccctaacatatgatgttagtatcacatattagggtcatgcatcaatactatcccctaacgtataagttaaatagtaaccccaaccccatatattaacactatgataagcttatcaaaataatcttgttattactttgaccctcttatcctaaaataaagtttaaaacccttaaaacgtccttataaagtatttagtacataggtcgaggaaaaactacccttaagatttttaaagcttttatgacttagttttaagccttagataactttcttaaataagattttattccaaaactcctctgaagcatattaggcatgtataaaagcgtttagaatagcacctttagaaatttaatggggtacaccaaaagtgtaccccattaacgtttttattgtaaaagcaaatcaaaacttaatatttagatattatatatatccgtattcctcctgcataaacccctctaaaagcctagtttaagcctttaaccttatttcttaatttgttgtgatttgttcaaaatgaattttaccgctctaaaagcctctatattgattttttatcagactttgtattcccgatactaaaagtagtaaaaaactcgaatatggggctaataagctacttaaaatctgtattatatgtatttgattattgaaaataaaaagcaatatgtgttttatatatcttaagctaataacttttacaacattcatttagtaacatttaaaagtatcttaatttgatttttttctgcaaaattccttttcaaagccgtatataacgacattttctcttaaagtaaaacaaaataacattaaaacattcatttagtaacatttgaacattcatttagtaatagtttttaatcctcatcatcttcccatccaagaaggcctctttctatctttgcaaaatcatactttctctgctcatagttattaaaattatcaactgcaacatttgcttttggctctttaaaatccttaactagagttcttatgtacccaactatgtttttcacgtttttgttaagagcatactcgtaacaattctttatcaccttaagatctccgccgctctcctttagaatactctcagcctctttattggttatcttgtgattcttaaatattttctgtaccttagttgcctcatcattctcgctttgtgttgcacccgttacagcaacttcatttttgaccttaacagtattactgtcttttattaaaaatttaatgcctgtaaccttttttccagtttttattggggtgaaatcaaaagatatatcactaccatttatttccttctgcgcttggactaaaactttatttttaaatacggcatagtttttatagcttggtggacaattcaatttgtattgaagttcatctatgttatcaattctccatccggtatccgagaaggatttaagcatgtaataaattctttttgagtatatactcctaaaattcagagtgtattgaagctcataataaattctttttttcatttccagaagtgcagcctttaaagtttctcctatttcgaaataaattgatccatccttgtcattgtaattaagcatactaaaccaagtaaaataaaattccttgcctgcagttttgtcttttattataaatttattgtgctttgtgaaaagatcctttgtagccttctttatatctctataaacattagtcgagcctgaaacaaagagattcttgtatttctcaatatcaattttataaacatgtttaccatcgtcctttatagtatttaatatcatgtctataatatcattttcctttgaggtcaaattgtatctagcttcaataagcttttcaggacgcattgctactaatttctttttcatagtattaccaccttttaagcatataattgtcacattactattataactataactattactacatacaagtaatagtaacaattcatttagtaacagttgcgcattcatttagtaatagtttaaaagttattcacattcatttagtaacaattgcgcattcatttggtaacatttatactccggaaagccttgatatatcttgatttgagccaaccctactatctttactaatttgttgttattactattattacaacaatagagagcagatgttgtttttttagaacattcatttagtaatagtttaaaagaaaaatccgaaaggtattaaaacagggaagctaaataaactctagcttcccttaagtatttattattcaaaatctatattattcacgcaaaaatcacacatcttgtttatgagttcatttcggctgtagcctgttttcttgcatatttgatctagctctttaactaaattctcgtccatgtatagattaaaggttttctttatagacttctcatcttttttctttgatattttaaatgtgccttctttgactactttagcctctggcagagaatcattaatctcctcttttttttcaggtacatcacttttgatattatttttaatgctttccctaaaattatttttcactttatataccacccttatctctaatactaaagttatgtatcaatacttattataatattactaattgaatgttaagttaaactttagttttaatattataacttaatacaaaaaagtaatacaaaacattaatactacatattaatattaagtattaaccctaaattaaagtctttctagtatttcattgtacaaagacttgtaaaccttactgcgttcaacatcatattcctgtatagttctatgtaatgctgcagcttctttatatttaacactgctgtatactatagtatcgaataatttttcacgtaattcttcttgtacaacttcatcaaattgtttattaaatacggtcctcttttcaaatctatttctcaaaattcctaaaagattaagatttggattaagaccactttcattcatttcttcaacaactttgtttaccatattcaaaccttgtagagcacttgtagagttgtctattacttctataaaataattgctcattacaagactattttgaactgtaatacctaagaaaggagaattatctattataataaaatcaaaatcattattgaattttaaaaatttattttttagaatactttctctattcattttatttgtaagcatgctttccaagatagcactatcaatagtatttgaaagaacatatatatatggattatgagattctatgcaatcttcaaagccaactttattatttgtataaagatcatataagttgaattcactctttatatttaatatttgagttatattactctgactatcattatctattaaaagaactttcttcttattttttgccatttcaccggccaaattaattgcagtagttgttttgccaactccacctttaacgttgattatacttattacattagtcacattatcaccgacctttttaattaaaactgtgagaagtaaaacctaacctaattatattaaagtactaatagttaagatactatttattataagatgatatctcacatggtttctctactcttatattttagcatattttttataatataaatactatattttagcattttgtattgatattttgtttaatattaaatattagtattatatattaatattatgaattagggttataaattaatatttttatttatttcttctctatagtaatcaatcttattatctaattctttaagattttcaatatacgaatttatttcttttttaagattttctctatgggcaattagcatttcaaaccgttcttcaagagttgtttttccaagggatctcaaaacagcatatttcttaatttcctttattggcatgttagtgttttttaatctttttataaattctatccattttaaatctttttcatcgtaaaatcgcctgccattttctttgcgcttagatgtaattaaattttccttttcataataacgcaaggtatatatgcttataccagtaagttttgagaattcgcctattgaatagtacaatttaaaaacctcctttataatgcttgacctagagttaactctaactc

SEQ ID NO: 17 - protein, 443 aa, Clostridium acetobutylicum
MVSYKILSVANKLKNIRDKYGLSQEDLAGNEITRNLISQIEHNKANLTRSAAEIMLKNLKKICDKKNVQVDEDINYLMEDEKSQAIKVLDKYIDDLRDLTIYKDNVFINKLREVEDFLVTWDFRDKKITIFELAGDYFSSTNDFYNASLYYEKAKALIDINIYSDNIVHILRKLSMTYYYMLRYQDDINCCEFALKQFKNMDEEYRCIFLFNSSLCYGQLKKYDLALKRLNEVESIIKNIDQNKYYEVLIQKAICYQWMKEYQKSLDIYNKLLESIDKSDYEKYLFILVNSSDIYVENSNFEKAESNLRIILENINNLNESSTLLPSTYLEMSRILKKLGYTKDAELYCLKSLNYAKRNTHYYLVNDIYGELLDIYKTLNVPEKVQTIKDEFFSNSSRDKNLNSKLMFKLLDFYFATNDIHSIKEIYDFSKNFIQERMINLCY

SEQ ID NO: 18 - protein, 434 aa, Clostridium acetobutylicum
MCVYEILPTGVKLKKLREKYKLNQDDLAGNEITRNLISQIEHGKARLTRHAAEIMFKNLQGICNNRDIETDEDIEYLLEDEESQANKILDRYITELKDLSVYKDGMFQNKLDEVENFTVNWNIIDKKIIIFELAGDYFFNTNDLHNSCMYYEKAKALMDNTIYSDNLISILRKLSMVYFYMDKYDENIKCCDFAINNFKNINEEYYCIFMYNSALCYIKLKEYDKALKRLEKIEKKVQRIGMDRYYAVMNQKVVCFGELERYAESLDLNERIINNINKDNCQSYLVALINSIYIHMELNNKEKAKEVLNIVDEYINNLNQNNKYLPNTYCEVGRMHSKLNETKKAEKFYYIALNYAKKFNRNSLIKDILSDLIDIYISLNDEKSISKMKDEFFVICGREKKISRNLECKLIEFYLEAEDIQTLKELYNFNKRIS

SEQ ID NO: 19 - protein, 434 aa, Clostridium acetobutylicum
MESYKIISSGEKLKTIRKKYGLKQEELAGAEITRNLISQIEHNKAKLTKKAAQVIFKNLQKICNTRNISVEVELAYLIEDEKDQANKILNEYIKELKDLTVYKDTSFSTKLTEVEKFLSTWNFIDKKIIIFELAGDYFCSIDDFYNSSIYYEKAKALADLDIHDNHMLSILRKLSMVYFYMGKYEYNIKCCEFAMDRFDHMSEEYFCIFLFNSALCYTELKEYDKAIRNLNKLEKTIKNTNTDKYYQVLLQKSLCLQYIGKYEESLTLYNKVLKSIDEKSYDKYVLSFINISEIYLNLGEYDKARETSNKIMEYIVYIDENYKNMPRFYFEIGKIFKRLKAFDTSEKYFLKSLELSKKYTHYYLIKDILCELVEVYKTQNNLDGIAYIKSQFFILTGKDNSINLAIMYKLLGFYLEIDDIQSLKEIYSFTKNFV

SEQ ID NO: 20 - protein, 434 aa, Clostridium acetobutylicum
MGTYEIMSIGDKLRNLRKKYNLSQEDLAGNVITRNLISQIEHNKANLTRSAAKIMLDNLKKICEKKTTVIDESIDYLLESEETQANKVLDRYIRELRDLSIYRDGIFLSKLSEVEEFLAKWDIKDKKIAVFELAGDYYCNISDFYNSSLYYEKAKAIMDGDIHSDIMLSILRKLSMVYYYMGKYEDDIKCCNFAINHFNNISEEYYCIFIYNMSSCYMNLKQYDIALEGFKKIKETTKSISADKYYDVCIQIATCLGELKRYDESLELYYKIIDSMGEKRYEKYIAVLINLVEIYIKIGDNDKIKEKLTLILETKKYLNENFVYLSEIYFEIGKIGKELVDLKLAEEYYEKALTYAKKNMRYYLEGDILCELIDLYGEQNNRKKILDIMNEFFILTGKESKINTKVMYKLIDFYLDMKDINALRDIISFSKKFI

SEQ ID NO: 21 - protein, 434 aa, Clostridium acetobutylicum
MRSYQILPIGVKLKKLREKYKLNQDSLAGNDITRNLISQIEHGKANLTRHAAEIMLKNLQEICNRRNITIEEDIEYLIEDEASQANKILDQYIKELKDLIVYKDISFVDKLNEVEAFLVNWDIKDKKIVIFELAGDYFCSINNFYKSAIYYEKARSLINVDMVTDNVVSILRKLSMVYFYTAKYDYGAKCCEFALERFTSMDDKYKVIFLFNSSLCYIKLEEYDKALNKLIKLENIIKEIDKQKYYEVLLQKAACYEAVKNYEKSLNICNKILDSMDKKDNEQYIMILINLSQLYIKLSNFNKSREILNLVLENLVNINKEFKLLPNFHFEIAKVYRELNELESAEEHYLKALKYAKNYSYYFLIDDILLELIDIYILQNNIMKISDIKNEFFILSGKKDKINSKIMLKLIRVYLDKKDINSLEEIYEFSAKLM

SEQ ID NO: 22 - protein, 434 aa, Clostridium acetobutylicum
MASYEILSVGDKLKSLRKKYKLNQDDLAGNEITRNLISQIEHNKAKLTRKSAEVMMRNLKRICEEREMPFQEDIEYLLEDERLQAEKILDIYINELKDLSVYKDASFVNKLNEAENFLVKWSFEDKKISIYTLAGDYFCNSNDFYKSAVYYEKARSLININMPSHDVVPIFRKLSMVYFYMGKYEYDIKCCEFALDRFEDMDEEYTAIFLYNSALCYTKLKQYDKSLKRLEKIENMLEKGSEKYYRALIHKAVCLQYLEKYDESLDIYNKLLIRFAGKNDYENSVIILLNIAEIYVNLSDNEKALEYLKTAERSIVNLDETHPKVPNIYFELGSRFSQLKDLNNAKEYYLKALEYAKKFKYYFVIEDILLELIDIYNKEKISELKKEFFLVTSKLDQINSRLMLKMIKYYTNISDFQSINEICKFSEDFIKDKL

SEQ ID NO: 23 - protein, 435 aa, Clostridium acetobutylicum
MGNCQILSSGDKIKLIRKKYGLRQDDIVGEEVTRNLISQIEHNKAKLTKSTAEIIIKNLKEIAKKNNLEMDVTADYLLEDELAQANSILENYVDELKNLLVYKCSRFYESLKSAEEFLIQWDIKEKKVQIYELAGDYFYIQNDLAKSVLYYEKAFDILDKTSYNKSLLSILRKLSLMYLNSLKYDRSIECCNFALNHFKNMPDDYISIFLFNTALCYYYMHYYEKALEVIDNLEPLIKDNTSKLIDVLNNKACCLSDLNRIDEAAEIYLRIFNLLNTNNIKSSQYLLILSNLIDTFAKKDVKDEVIKYLNLLLDRFPTSSQDDSYLSVACFNAAKAFIYLGDLQKAEEYLLKALTLSKNHNKYSLQEKTLSLLTDLYIQLNDFEKLEEINLEAVVLSNSQQKVCTNIFYKLLKFLNQNNKTEDIDKILNFLIKFK

SEQ ID NO: 24 - protein, 434 aa, Clostridium acetobutylicum
MEILSLGEKIKARRKELNMTLKDLAGDRITPGQISLVESGKSNPSMDLLEYLAGALNTSVEYLMESEETQAEKICVYYENTAEAYMLNDELMEAEQYLEKAMYYAENYKISYRKARTLYLYGCINMNKNELGVAQQFFLSSNVLFIKLNHYEDIINTFINLGKITLNLKAYNSSCSYFEQAERVSRDNDIGNDFLIGEIYYYMSLVYFKMNNSNKTIKYCLMAKEKFAELENKKEYARTLLILSKEYSKSGDVDNAIKYSKKALKAFKENDNMFAVADIENELGKLFYEFENIEESFIHLNKAKEIRKKTKGHEFIETLCNICENYIKLKDTENSQKVLNEIKENIDGNNVFDILKYYMLKYRISILNRSLKEAENILLRALQYAENMELEKEAAEFSVIIGKYYIDNGDDVEAAKYLNSGIEKFKKIGVLKDL

SEQ ID NO: 25 - protein, 421 aa, Clostridium acetobutylicum
MEILSVGEKIKRARIYKRLTLKDICDDKVSVSKMSCIENGKITPDNEILEFVAKKLNVALDYLKYDVKDQFQSNLDNLKDIEEGKKDEYLRYNVYYAEQYEYYDIAFQFMHELFNLYVNKNKLDIVQSLTSEYYDICRKVTDCDNRSMYNLDIGKYLLASREYRQAINYYSRVRKELKTGFSENKKRIKMLIESYYYETLSYILCEDYDNAYELEKELLELIEYVDTDNQHAKIYSVMMFLCLKKNIDQFDYYKEKIENYCDINSEIKARVMYVCALKMINDEKVEEAKGYIAKALEQFQGKIENKYIPFIVELVNEVSRRNNLERYRGICDLILDYSIGIENSVLMERCYYLKSRIFKASNDLESYEMYMNLALDLLIKSGNEDDIYTRYMEMGNMYSTLGNVKDALRYFNLAINMSNKM

SEQ ID NO: 26 - protein, 273 aa, Clostridium acetobutylicum
MRRVISIFRKLSAVYCHTGNFAEGIRVCKYALGRFTEMEDKYKCIFTFNMSLYYNYLGEYGKALNAITGFESVIKATYEDRYYKVLLLKADCYYGAERYAESLSIYNKLISITLKDDFNNLCVYYNNMTQVYLRMGKRDMAVNCINTVINNLHNISDDFEALPQIYAELGKSYLMMADNDKSIKYLTIALKLSKDFKYYSVTKDILNELSKIKGNSNKLKLKDEFIILTENMGRSYDSLNHSLVFNIIQYYTRLGDVASINELCEYCKERKVG

SEQ ID NO: 27 - protein, 179 aa, Clostridium acetobutylicum
MDIGEKIKRLRIEKQLTQEELANRCELSKGFISQIERNLTSPSIATLTDILDALGTNLPDFFKEDNQEKIVFKKDDMCETSDEELKYNLKWLVSNSQKDSMEPVMLTLYENGSYLEDEPHEGEEFGYVLKGTIYLKLGNKKFKVKSGESFYFKPNVNHQISNAGKKTASIIWISTPPSF

SEQ ID NO: 28 - protein, 119 aa, Clostridium acetobutylicum
MTSILTIGEKIKKLRSEYKLNQDDIVGTELTRNLISQIEHGKANLTRSTAELIIRNTKDILEKRGETLDEGINVEYLLETEESQAKKVIASYIQDLKEISVYKDNRFNVLLEKIENLLS

SEQ ID NO: 29 - protein, 123 aa, Clostridium acetobutylicum
MLGENLKKLRKEKGLTQRQLAGETGLSVSIISKLEEGKKTGSIETLQTLSNYFNVTVDELSENKSANIDKKEYAVDELLKRLVKKGLIENVEDIDSDLQKLITYTIKETINKIIEEEKIKKEQ

SEQ ID NO: 30 - protein, 243 aa, Clostridium acetobutylicum
MADKTKVYICHLSKIKGMVLFMNRAGEKVKKIREDAKLSQKQFAKKLGVAEKFINEIECGRKVVTESLIHRIKKLYGKDINDINMSADEEEEVRETNYQFKSQAKKKETNEVWTDALSSILKSVPVYDYSFKKVIDKRSLPVIANKIEGFNQDKVFFIKIENNDMTGFRIMKDDVAFGHMTSEIENNAICLIEYNDLRVLRQIKRLDNNKLLLISNNGNLMTQTVQTNEIKIIGRINKVEFCI

SEQ ID NO: 31 - protein, 345 aa, Clostridium acetobutylicum
MGISEIIRSHRKKENLTQEQVANYLNISTPAVNKWENGITYPDITLLAPLARILKIDVNTLLAFNEELTEKEVNKLGRSVGEIVEKEGYQKAFEKGSDLIKQYSSCDELILRISSILRLFLVTAKVEKKDIYEDKIIAWAEIVAASRNEKTADMAKIFLSAVYRDKKEYKKAKEILDKVPDMELGSDKKIQQLLLLESSGEFDKAYGACEEVLLYNAQESLGAMVLIIRMLLKENKFSEAEEYTQRAKKLVEVFDLGEYSKYTLELSLIKEKRDEEKAVELIRNMIDNADSMNNFMRSKLYKHRKIEVTNSLDKDRYKKIVRMSIIKDKALDFVKDDPRVKSLLK

SEQ ID NO: 32 - protein, 232 aa, Clostridium acetobutylicum
MNTIGERLKYLRKLNNLTQKQVAEKTGVQRGNISHYEKNDFLPSRVALISFANFFKTNYDWIVYGKGAIPKSIDEVMYAKSNSIAECNNGAAVDFSKRLIFTMKYFHETIDGLCLKLNISKDIFHEILIKKNVSAFDLFKICNYFNVSMDWMFNGNITYLKSDAKLQQAYLMNSKGNKPLSYDNHGMVQCTCEEKKLLIFFENLNTKDKSLVIDILNSVNNQASMDIQKLIK

SEQ ID NO: 33 - protein, 110 aa, Clostridium acetobutylicum
MYIDYSIIGDRIRNSRKSKNYTQENLAEYLDVSTVYVSKIECGKTKINLETLMKICKFLNITPSYILTGSTTDSENYQKNEITDMLKTCPPEKIKLISSMIKLIVNFEKK

SEQ ID NO: 34 - protein, 119 aa, Clostridium acetobutylicum
MELMELLKNDRINKGMTQEEYARILNITRGTLSHLEKGRSPSAETAKKISNYFNRPISELIGHKKIKKLSELETTNMLINSLIKKKEITKEQISDEAKKLIWASLELEIKLKLEMKERI

SEQ ID NO: 35 - protein, 78 aa, Clostridium acetobutylicum
MKNRLKELREAFGLTQEQLGNLIGVSRQAINSIETEKCEPSIWLAYDISKVFHKSIEYIFLFEESEKKSRAKQIRGVI

SEQ ID NO: 36 - protein, 64 aa, Clostridium acetobutylicum
MKNNIRKLREQFGLTQQELAERVSVSRQTIISLENERYNPSIFLAHKIAKSFELTIENVFIFED

SEQ ID NO: 37 - protein, 69 aa, Clostridium acetobutylicum
MKTRIQELRKQHKLSQEELALAVGVTRQTITSLEREKYTASLVLAYKIAHYFGLTIEEIFDFSEIEEEL

SEQ ID NO: 38 - protein, 263 aa, Clostridium acetobutylicum
MKDSNLEIKILKNKIYDETSSIFIHNLKKLIQLEGTQKKLASKIGVSEDLLSKYKSGDAFPAIETILYICKLYNITIDEFLNIPLTSSYFEDMLYDDTGFEDIFKQDYFCYFFVTNSGKKSGIHESNLRITKKNCIFRIYIKGEVIKEFKGTYKISDNLVFFNLYSREYGYAYITMIKPSLNKSKYIGGIAMLSLPSDANSKPCCQKIIISSSKINRELSFDILNNFLCFKSERGSFGNIKISRYEDEKVYDFITNLNEETKL

SEQ ID NO: 39 - protein, 118 aa, Clostridium acetobutylicum
MFKHEIGRKLKAARENANLKQSDVAKIIGSTFQKISSFETGRTRVDLETLIRLCEIYNVDADYILSTDKKNSNNLTLKPEESNLIVKFRQLPDSVKEDITDFINMKYNKLTISFLKNK

SEQ ID NO: 40 - protein, 91 aa, Clostridium acetobutylicum
MQCEQNYDFSKIFTTTTSNTTNLYKNLPEKTIGEKIYKLRMLHGYSRREFAKVCSIGYTSVCKYELNYSLPHPKNLNKICSAFNISMSYFL

SEQ ID NO: 41 - protein, 55 aa, Clostridium acetobutylicum
MKQEQLAKLVGVRRETIEHLENEKYNPSLKLAMDIAKVFGKSVEEVFQFVDDNEI

SEQ ID NO: 42 - protein, 359 aa, Clostridium acetobutylicum
MNSDGLRIRCEKDIDLKLRDVIIEFTRWLRSKYVFPIKVTVFIKNKYKSKSNDKERFSSSFVIPNKERGNPHIRIEVKNDMYDTIELREYVVYSIAYEVMIYMQWIKKLEFCDRDAEKQANKLVDLFIEERGDDLTVTNKEKKMLELADKKFNNKDFDKAISIYKEMIKNDYYYSGWVYSSIAYCYDCLENYNEALVYYDKALKNNKDSVIYMNKGFALQSLEKHKEAIENFDKSIKIKPSKEAYVFKADSQGRLKKFKQAIECCNEALKLDENYDIPYNMKGQFLYEIEEFKEAKKMFLKAISISADYADAYYNLALVYMKLDDFKLSIKYLNKAIKLDEEYRRYAEEEERAWRNYIK

SEQ ID NO: 43 - protein, 256 aa, Clostridium acetobutylicum
MTFDKLYKKAEGYYMSEDYEKALKLFKECYELELDNNSLNYIGCCYLETNQFESAISTFSELINDYPEWERPVLNLGRVFIKKQMFSEALECFQKALKINPNEEETYFYLGIYYFTMKNFNKATEFYKKALEINNSIPEVHLNLGICYSKIGLDEMAIDEFDDAFRLDNSSVDALFNKAMVFIFMKDYNKAIEMFLCINKMEPEKIENIIYIAELYLIIKDLDNASKWINEILIKDPKNITANKLLKILLALKNKE

SEQ ID NO: 44 - protein, 254 aa, Clostridium acetobutylicum
MDIEKIFEEGEEYYVNGDYNKALEYFQNGYKISKNEDFLNYIGCCYLNLNKFEEAISTFEELMQVYPEWERPVFNLGRVYLKLELYQEALDYFNKALVINPDDEDVYFYFGIYFEKKRDYKNAICCQKKSLRLNKFQPETHLHLGLCYLRTNKYNEAIVEFDMCCKQDNNCEDAIYNKAITLFCMGRYMQSLYTSLDLYKANPNDVENILNIGECYYRLGNLSYAENHFNEVLKIDSLNKVASGFLKKIHNKKE

SEQ ID NO: 45 - protein, 1787 aa, Clostridium acetobutylicum
MNIINNRYRIVDTIDDKQILTSLEVIDLLRNDSKLRLSIIDLKNFSDSAKDYIKNEFINLVNLNEKSIYRLYSLNVINSIDNKFTDDMKWYYTCEINREADRLSDIVESLDENSILDIFLQVCVAIQYLNCSGYVYKNIDIKNIYVDYKDGKFNIKLNDLISAELDRINKKYKSRIEAINFKLNLDNYNDYQRDIIEQIHKLGILLFELCRSKFVKNIEIDDLSLLCDDKTNTDDIMCSENPHKKFLLKIAPIIDKMVSNIGRRYTNIKDIVNHINDAFEKYVDTYEVRALEKLNYNVKIVGRDKEIKKVLNLCNFSKGGISKSNLFIVHGKSGIGKTRFLKEIKYIFKFNMDNVYYSFGSRDYIKRNVFDEIFKQILVSYDYRVIKTYERELGNEIFEILKDIKKDSVDMKQKDELFDRCINFMNIMAERKKLVIIVDNLDKIDDFSIDFIRYFYRRIRNTKNIVIMFSYSDESIYVNNNISQFINLFKISFTDITLNELNFNGTNELIGSVLGTITPPKEFAKKIFEKTKGNPGFIIEVLKGLYVRKYIYVNEEDGLWVTSYDKINEIPIHSSLVKNIQNQINDMDGIELEVVNAMSIFNVRLNIGIIKMFFKEYDDGIIEATVAKLIKRGAVEYIEEDSGIYYNISNKVIKTTLTEKMDAYYKSSINERAAEVLEKIDPDKYREEILYHFENSLNINKIIEYYLGKYKHIIYVDNREKVISKIKRLVKTIRTDCSLSGIRLLIILGDLLLIDEKIEEAQIYFNLAVTLAESIEEYDVQFQALKRIVRILQTNSKLKESRKYIRNQEKLLKKYYKLEFELLIYTEEAFNFYINKEFERAISICNNVLEKCNKGMEDVQFYAYYILSNTFIEKRDMQKALKYNKICTNKKYFMENLTYVLDSLNNIAYIYGNYYEDFSQCKNYLLEIFQIATNFNYSHFKLLSLSQIATLDFKQGNYKESYKAFKNVLDLSEKTNDKYIEVYCYCRLCKVCLVMYDIKSAYEYFIKASIRIVDFENDLDIMNMYYIAAIETYLKIGLPKKSKEYMEKFKEKYGSENIKKKEEVVECFIDYLIEKNEKSVSNFQKAVHEMNINNKSVNSITTIIQLAVIVYWKKDLEIFYIIYKKLSSYHMKNDVMKGAMKVIKALNASGEKMLKYSINAIRENEKDIKVFKFLYANIAQYYLKNGNYIRAINYFFDYIDFIWRYFLSVPDKYKKDFAMCYSIRDDLIKYIGIVNEYAGQEIIFSKSVDVILNGDGIDKFYEGTNLKRLFYTRKFKKDLKKYYQSFIPREVSSRIDVMKNQVDSSITNIQNILRYLKHSLVAKKIYFILNQAQDEDTVVFTQNRNFIDNNILKENWVINDVNTRKKLIFIKRFGFKPEKKLEDDIKAVICMPVYKLLSNFNKQDNKILSGILYIETDKILNNFNVDAINKCIELNGLLSLNVDKYTLKISATIDSLTGVMTRRYLDVYIDEMFQKERNSNKEFTVFMYDLDNFKAINDKFGHGTGDTVLKEVSRIVKNNIDGESICARYGGEEFIVILPSYNVLKAYEIADGIREKIDRAKILGNKRSVTISVGLVSYPDMARSREEIFEKVDKALYIAKNTGRNKCVIWNERFNYKAKVTNKITGIVTGNPVKDSRNVLVTVEFMELLRSSSNVEEKIYNVLGRLVEFFEAAYCSIILLDDKQISHIYTRKIFKTEFVKKTYINDKIVQEVLEKKVGLYMIDWDNISGFDETTGMPDWDSIMVIPLNNKGIIKGILYFKVPTKIKEFKFEEFNFASAISNIVAALI

SEQ ID NO: 46 - protein, 378 aa, Clostridium acetobutylicum
MEQLNIKEENKYAKMAVNLNFVGKYDEAVKYFIKALQANENDFGVLINIAANLTVLKRYDEALEYYDRALKINPIDEFVLCEKANILFTQDRFNEALKYYDAVIENNQINKLAYYNKAMSYEKLGKFHEAIKSCDLLIKLDKSYIDIYYLKARLQEKFGKYKDAISTYSVIATLKQDDGQPYLKISSIYNKIGFYNRALEYIQKMIRISPERAIGYTNKGLILSSLERYHEALECFDKAIKIENDDPDTYMRKGNAYRKVSQNYKALSCYDKAIEINELFFKAYIFKAELLNELKQYDELALCYEALIEKDKSKVYSAYVNAPYKLVLTYKELKDYDKARCACRKAINYYEELIYFSDGSEEFKRIKGELGGMLYGFR

SEQ ID NO: 47 - protein, 332 aa, Clostridium acetobutylicum
MINYKKKIAALMLLATCLSGCSYDLKDLQHLKSKSSFDTVGIKILCEHKKYSEAMKQIDDYLKKHPDDKVALSEKGYVLVSQDKNEDGLLVLLKVNDKYPNYDVTLNNISWAYNNLKMYKLANKYADLALKQTPNSSEELSNKGTALFGLKNYKAAEKYYDKALEKKSTDKVAIWGKALSLYKEKSYSKSLTYFKKYVIVDSSDIQASYYMEKCYIALNDVDGAIKEFKSDIIADPKNKGNYFALGDMYRKKTDYSSALSCYDTLSEIDPEDPEIYFQKAICLVKSGDKDGACENLKLTLSYDSEYVSDIEEEPAFDALKDYDKFKEILNSK

SEQ ID NO: 48 - protein, 362 aa, Clostridium acetobutylicum
MRKNYTIYASIIFLITTLILSGCSSRSEGFLEKANSSMANKQYTKALNYYSSAINSDKSNTDAITGKAYAFIMLKRYPEAVSCAESAIKQNKNLGKAYAYKGIALSRQGNYIDALKYLDKAIELKFKDSKTLNERGYDLIKIGRSDLAVDPLTEAIKINPKYYDAYLNKASALVNNKNYTDAKSCLDEALKLSTNKTDFYNKEGLLFQSAGLYDDAKACLDKAISLSPKNAVLYYNKGLVLTDSNNYTEAIDLFNKAISLNSKYSNAYDAKGLALRSLNKLEDAVKEFDNAIKYNSYNSAAYNDKACVLADKGNLEDALKSINKAIEINPESKDFYTNKSFILKRMGKTKEAEEFQKKANAL

SEQ ID NO: 49 - protein, 593 aa, Clostridium acetobutylicum
MSNEISLCMIVKNEEKYLFQCLDSVKDIVDEIIIVDTGSTDKTVEIAKKFGAEIHYFMWNNSFSDARNESLKYATKDWIFIMDGDDEFSKDDKEKFKELVKNNLKEDCLYYFETLSYCGEFVDSSNISVNLNPRLFKNNYGYKYEGIVHNQLINTEKEIKNVIYNIRIYHYGYLEDVSKKKNKRGRNIPLLKKQLKENPDDRFAHFNIGNEYYAIGDLQKALTHYCEAYKDFNPSSGFGFVLITRLIVTNFGIGKHEKAIEFADIGLEYYPNATDIYFLKALIYEATRRPTLAIKALKRCIEMGEPPSNLKLYYGTWSFKALYELVNIYMGLKDYEEAYKYCIETIKAKNDFVNPVYVIGHILKERKTPIEEFKVELEKLFSDYPKAYFFIANILYDEGYFNEALEYTDKCEKEGLNSDAILDLKLKAMIRAQKFNECAEANYFAKESVFYFNASMYKVLSLVLIGKFKEALKDLEIFKDGKLKRQDKKELEVYSQFVKLFMNEETKVLSEDKEDKEYTGFILDICDILLSNKLYDEFEKALNLFNLISDENVLLNLSKLYYKHGIESMAKKEAIRSIKEFEVFDNEILDILR

SEQ ID NO: 50 - protein, 346 aa, Clostridium acetobutylicum
MENENVLRAQELNNRGLIFIERNAGDEALKYFNKAIKEDENFKEAYLNKAALCLAMNKVDDAVSCYDKLIIKYPNEGKAYFGKGNVMFFYKDNIKKAIELYNRSIYLGEMSEGVYYNLALCMESIGELDDAIKWLNRALIINDQNIITLNKKAAVLIKIKKFYEALECYNRVLKIEVDNEEVYHFKAMLLGEMGKIEKAFETISRGEALLGEQMTLCYDKAVLFEKQKEFEKALECTEKALLFDEGNVLLILKKGDLLTYLKKIDEAKSTYDKILEFHENNMEGVFAKANLCMLLGEHEDAEEFFKEIIERLSGEESVLINSYYYRALNLKKWAKTRKQKRLIRKQ

SEQ ID NO: 51 - protein, 376 aa, Clostridium acetobutylicum
MANENLDNAEKYKKMALNLNLVDKHDLAIEYFKKSLEYKKDDFGVLINIAANYTVLKQYEKAIEYYERSLKIAPNDEFAMSEIGNLLFLKEDFKGAAKQFDNIVKNNKDNKTALYNKGISLERAGEYLEAIECYDLLIKLDNKYMDAYYSKARVQEEIGKHKEAISTYIAIANLKKDDGEPYLRISSIYNRIGFYDKALIYIEKLLEVDPERVIGYVDKALILISTERYNDALEWINRAIKMENRDPEIYTIKGNLYRKIKQYDEAIKWYDEAIKVDKSFFKSYIFKAEVLLEIKAYDEAIETYKYLMENDKSKLYSSFSKAPYKLVLLYKKLGDYDEVKAMGEKAIKYYEELISIAKENNEFVGIVENIKELMKF

SEQ ID NO: 52 - protein, 444 aa, Clostridium acetobutylicum
MIEDKVMSKAEELNKRGIIFIQKKQGDEALKYFNRAIEADPNFKDAYYNKALVNLALEQVDKAIETIDNVLIKDPNEGEAYFEKGNIFFYYKNDVKAAVELYNKAMYFGIKNEAIYYNMAQCMEATGEREDAIKWLDRVIIIDNKSVEAMMKKAEILIDMRRYEDAINCYDGILRIQADNEGAYHFKAVLLGETNKVEQAFETLKSAEEILGKRELLEFDKCLLYEKEKDLEKALNCINSGIEIDDKNILYLSKKASLLILLQKIEEAKKVYDYMIEIAPEEMESYFSKASLLMLNKEYEEAFKLYETIIEKSDEENPYRINSYYYKALCLKSGNKLEEAKEAYEEAVGKYNLLIVKYPYDHQLHLLKANSLRDEEKYAEAEELYEYILDLNKNLAEVYLMRAKNRLGLGKENEARQDLKMALEMNEAFKKVIDLDEELSKLLA

SEQ ID NO: 53 - protein, 305 aa, Clostridium acetobutylicum
MKDNIQIDKYLKKAEEAFLDNKLVKSLDYYNKVYELTNGEDVDTIINLALIYDSLGKVEKAEEYYKEALSIDDYEERAYYGLATIYDEKEDYEEAIKLYNKAIYINPNYHKAYFFLANAYDLSGQKNLAIETYEKLLSLDDMDFWSNLNLGCIYEEQNKNDLAYRLFSKALKINPNNHLALFNMGVICCKFNMIEKAINFYEKSIEKNKSYEYSYLNLAVIYKHRDTEKGIQILSSGIENCEKTHFLYYNRSCFYALINENNKSCEDIITALKLYPEFLKYVLEDEELESVRELNSFKSFAAKLN

SEQ ID NO: 54 - protein, 318 aa, Clostridium acetobutylicum
MNLLNLFTYVIPIAICIILPIFIIVTHFQIKSLNKAVTSFNKGDRSNALEILSKLVKSPIKNVKANAYITRERIYFYSRDFELSLRDLLQAIKLRPKTINDVYSFALSYHILGEPERALKYFLRAVELQPNVGISYENLAWFYYLTGKYDKAIENFEKAISMGSTNSVYRSLGITYAKIGDYKKSEEYLKKALDAEPEKPSTHIYFSYLKRKTNDIKLAKEYALKAIELNKNNFDGYKNLAEVNLAEDDYDGFYKNLEIFLEKINFVTNGEDFNDEVYDKVKDNEKFKELIAKTKVIKFKDLGIEIDDKKILNGKFLV

SEQ ID NO: 55 - protein, 396 aa, Clostridium acetobutylicum
MCTELEPHQRLKKIIDEIGVSQTKLACKYLGRATINKIIRGERPLNAAQAYKFIQRFKDFGYNADIELILGIPTKTIDSTVKKFLSNTKKHYLEFDKLIDKLYKDKAIEVIWNVIEKLDIQDVYKNANIILKYLTKLMQYDLDADIYLKVNIELIKIYTATANYERAITAFNSLKNFSILDRETKVKCFLNVALAYYNLREYKSSIDIASRVMKLKIFDKYYFKASIIKANVLYTDGRINESIKEYEKIAIKAEKYHFIEYVATSESNIGYVFTEQNKFNEAKLHLDEAMKLFDSLNNYYKLNVYDNVFGFKIKNNTADFDTFKKVILLAYDTNDKFRIKNNVKQFVNYAIRNKKSKEIFTKIIDFLNPKGIDLDSSLKLEIMEYVSGNTFESVLK

SEQ ID NO: 56 - protein, 436 aa, Clostridium acetobutylicum
MKEIGINKEDRYTELANNLKLMGKYDEAVEYYRKALEVDGDNFEAYANLGDLLDKTNKWEEACEVYGKAIELQPENEVILNERGNMFFKLQKYPEALKCYSKAIYFNYKFVVPYHNKGLVYEIFSEFDQAMKCYKLSIDIDPNYKEAYVSKARLEKKLGKYEDALETYNKLENLEKNNNKILLDMIKINIDMKNYKEALSEVEKLIKIYPEESSGYYIKGVLVNYLGKSEESLKFINKALRLDTKNPKIYYEKALIYSNIKKYDKALEFLEETISIDPDYYEAYILRIDILMKTGKYSEAVYYCRTLINRDNTKMYSAYGKAPYRMYLAYKAMGKKKDADEICKYAIKYYDEIIELSGFVPEFYVIKGILLTHFDRYNEAKECYDYALALDSKYAEAYYYRSKYYEAQGMKLEAEKDMKKCVELDKSYESYEENIN

SEQ ID NO: 57 - protein, 273 aa, Clostridium acetobutylicum
MLRKIIFIIKIMSIFMLLLSLLGCTPKGNPEKVLDSYYRYIKNNNAEAAYSALCNQSKRNFSKHDFLRLLNIQSKTNTLRSFKISRNEQYGKSKLDGTCYKNVGIFTVTENNHNNYENRDIEITYRRYVVNDNGKWKVYRGQENGKETLAQAMNMLAAMYIDGKGENKDLNNAVNILNDSIKLDRNLDKSYYLLGNSYTELKMYDEAIISIQKYLTMVNDNGSKSEAYNMLGVDYEFKGDYNQAQNYYNKAVDCNPNNQYAKTNLQRVLKNSN

SEQ ID NO: 58 - protein, 357 aa, Clostridium acetobutylicum
MSIQQEFKDKVAKLIFLELKKESVESIFNVKVKENIYSPIRPKRLIDKVKEGNKFENIPLSFFVEGMFYVLGGDENFKFNAIYSELMNKNLKTTTQYIKEIIYTEVKENNYEDAYILLKGLVTVEKNEENYDKIMMISEAIREKKPEFKEEELKIIEKAKELKGYIKPYFYEAIIKNENKDYEGAWYAINTYTENGGEENEDTLRLKHTLQDIRNYENAKEIMSENPKEALKIFIKLLDEFQDDAVLLYYIGVTYRILCNHEKAIYYLNESMSLDSNMVEVFNEMGINYAALGDMDNAISYLRKAFEVTKSIEICTNLIICYMNKGDLNQAKLHYEIAKKLNPEDEIVLKLGNSLEK

SEQ ID NO: 59 - protein, 657 aa, Clostridium acetobutylicum
MVKSDIIIVKNFHGVFCLNLVNEIFENKYKIIDILGKGGMSTVYLAKDIKLQKFWAIKEVSNNINDTSKLKVDLLAETNILKKLDHPALPRIVDIIKRDESLYIVMDFIDGVSLDKFIHKNGAINEKVVLDWAKQICDVLSYLHSQKPNPIIYRDMKPGNLMLTQNGKIKLIDFGIAREYKKEVSKDTTYIGTRGYAAPEQYGDCQSDARTDIYSFGVTLYHMLTGKGPNDPPFELKPVRELNSSLSEGIEHIIEKSTRQDPSLRYQNVDEMLYDIKNIHKLNSKYKKQLVKKYIKVAASACLFIFSVFLIISGVLGIKSDSANEYNNIIENGSKQNGDKAVEYFKQAVDKNSSNPKAYIKIIDTYLENGEYDQSIDFIETNLNNKQSELLKDNELLFKIGMAYFDDESYAKAYQYFNKIKGADISISEPLKYYKPVANALSKVDLQNKDKIVSSITQLEKYIDSRSDVDYKVESYITLAELYRDNPQIFPQNTDKEIGVLEKASSVSANKNNAILYGQLGQAYFDKASESKIEQDKYNFYLNKALDSYKNSIQMGSKISNTYCKLGLIYKYLGNTAESKNTFQKETQLFSDDYKGYMEMALLEYDSQQSAAPETRNYSEFVKYYNSTVSKKYNENDVDFMTLKQEYNDLKNQGVIK

SEQ ID NO: 60 - protein, 119 aa, Clostridium acetobutylicum
MIYFNKATDYYNKKDYKRALSMYKKALELKENESASLYNSAVCLIKLKEYEKAIPFIKSAINKKIDSRYFFNLGYCYAMIRDKKKALMYFNRAWALNYEDSDCEKAITLILNGYKKFSF

SEQ ID NO: 61 - protein, 791 aa, Clostridium acetobutylicum
MESSNNKIKLSVRNLVEFVLRCGDLDNRFSGGSSRAVEGTRAHTKLQKQSKKLAKEKENYIYNSEVFLKYETELEDVDFIIEGRADEIFIDNYCVTINEIKSTGRPLEFIDENFNIIHWAQVKCYGYIYAEQNNIENLNISLTYFNIDTEEIKVLTKEVSFEYLKKEFFEYLQKYVYWAKMAIDWQIVRDISIGQCDFPFKEYRKGQRKLAVYVYKTIKEKKKLFVKAPTGIGKTISTLFPAVKAFKEGEIEKIFYLTAKGTTALSALSAVELLNKKGLRLKTLILTSKEKICFNEETNCNPEECIYAKGHYDRVNDAIKDLLKNEDIYNREIIEEYAKKYNVCPFELSLDMSLWCDLVICDYNYVFDPSVYLKRFFSDAKGGYVFLVDEAHNLPDRARDMYSSELYKSKVMFLKKNLSKKDYIYKTINNINSFFINLKKLSEDKGYIIDEDDNYEEAAKVIYKFLNKCEKWILENKEHKIYKEMQEFYLDAFKFIKTYELYSDNYIFYGEKISSDFKIKLFCLDPSKFIEETVKKGISAVFFSATLSPMNYFKEILGAEEGDYNATFASPFSEDNRCIFIAKNISTKYAKREQNYDAVVQYIRSFVLQKKGNYMIFFPSYKYMNNIYDRFSAGEDYEVILQKSSMDETEKNDFLAAFNDESEKGTIGFCVLGGVFSEGIDLKGERLIGAVIVGVGLPMICLERDMIKKYFDNRNNLGYEYSYMYPGMNKVLQAAGRVIRSESDKGAIMLLDERFAKYSYKKLMPSEWENAIYSSGNLEIEKKLEIFWADW

SEQ ID NO: 62 - protein, 839 aa, Clostridium acetobutylicum
MNKRIVSMVAGLSIIFTTGFVTHISAAANKAAASVQSQGYKWDNAKIGAGGYVPAVIFNKTEKDLIYARTDMGGAYRWDKANNKWIPITDGFSDWTMLGCESIATDPIDTNRVYIAAGLYTNDWQDENAYILSSQDKGNTWKRYQLPFKVGGNMPGRNMGERLQIDPNDDKILYLGARSGNGLWKSEDYGQTWSKVDNFPDTGDYVQDPQNEYTADKVGVVWETFDPSTGTKGSPTQTMYVGAADKTGNNIYVTNDGGKTWSAVKGQPKGYLPHHGILASDGMLYISYSNTCGPYDGSDGQVWKYNTKTGEWTNITPPAVGDTKSGFGGISVDAQNPNNVVVATLNRWWPDEEIYRSTDAGKTWKPIWDWNGYPNRTLGYNLDYSAQPWLDWGKTGVTPPDPLVKLGWMMGDLEIDPFNSDRMFYGTGATLYGTDDLTNWDKGKNVDISVKANGIEECAVNDVVVPTKGAQLLSAVGDDCGFYHDDITKVPSKMMTTPNFSATTSIDYAESVPNFVVRVGNVDTSKNQQDKDCGISYDGGKNWFSAGSNISGVYKAGTVAAGADAKTIVWSPEEGANAAYSTDNGNKWTPCSGLPQGAKVRSDRVNPKKFYGFLNGKFYISTDAGATFTQSSQTGLPTKGKGIFKTVIGHEGDIWIAGGKDGLWHSTDSGATFTKVSGVDASDTVGLGKSKTDDGYPAIYMDATIDGTAGIFRSDDEGATWVRINDDAHQYGSPDYCITGDPNKYGRVFVGTNGRGIVYGDIDGSQPTPTPSVTLGDVNDDGIINGRDVMVLTQYIAGKDVTIDKKAADVNGDGTVNGRDLMTLRQYISGKITSFSSTK

SEQ ID NO: 63 - protein, 436 aa, Clostridium beijerinckii
MEILSLGEKIKRRRKQLNMTLKDLAKDRITPGQISLVESGRSNPSVDLLEYLADALNTNVEYLMESEESQAEKISLYYEQVGESCILQGDYEKGQRYIDNALYYCEKYNLEYRKAMIYFITAKSYMYKRDFPMAQKFFLSANVIFVKNNNYEQIIKTFLHLANIALELKAYHSSSSYLKQAEKVYIDNKVVDEFLMGEIYYNMARTYYDVEELDLALEYSCLARNRFEQVYNDEDYARNLFSLAEEFNKKGDLPNAIKYSKKTLEVYKKIQYNKSIVNIEHNLGKLFYELGNLDESLKHYDISKSISTQNRVGCINDILIDICKSYLKLKNTEQCSKILKDIENRIEEHDIDRKIECKLIKYTMFNIDDKPEQAESVLIDTYVLAKNSGKLSKAAELAMRVGKYFIDKKEEEEASYYLNQGIKLFDEAEKLENYKL

SEQ ID NO: 64 - protein, 371 aa, Clostridium beijerinckii
MKKLNIGECIAYKRKEKGVTQEQLADYIGVSKASVSKWESGLSYPDILLLPELATYFNISVDELLGYSPQLKKEDIKKIYNELSHEFAIKPFDEVTNRCEKLIKKYYSCFPFLLSMDQLLINYSILAKTEDIKREIFQKCILLSKRIKEESDNITEIKSSNTMEALAQMLLGNSEEVIRLLDNKLIPYSGEDVMLINAYKMQGEIDKANEVNQILVFNNVINMLRLLNNYLSINIMEQVLFEKIYSQGIQIIESFNLNEILTNDVLGIHIVAAQGYLMHKDKEKAICALEQYVNIVCKIKFPLKFKGNEYFTKVDKWFEDNSYIGTSTPVDETTIKKNFAAAITENPAFVSLREDEKYKFLVKKLKRKLDE

SEQ ID NO: 65 - protein, 359 aa, Clostridium beijerinckii
MNELNIGETILKLRKERKLTQEELALMIGISAGAVSKWENGNSMPDISILAPLARALNTSIDTLLSFHKELSEEEVNNIKSKLTKLFLNEGYAAGEKECKRYLSEYPNSIHLKVEVAGLLNTYLMMSEDESEEFVKAKRQEALDLFNKVAESKDPKYMQTALFFIAHMNMILGNYEESERALSELPKSLDPVTLYPVILEKQGKKEEIQRFCSNKLLNYLNNSILMLIIMAKTSKKEKDYEKAMLYLDACHKIQDMFHVGLGSAAYKYVELYIEIGDKEAAAKWFKTYIEEVISMGYDYSSNPYFNKVELEIKPEEQKIVRKKMLKSIIDNEEFKALTGIKEYDMAIKEIEKAILSSFQ

SEQ ID NO: 66 - protein, 196 aa, Clostridium beijerinckii
MDFDYIESLVYKCKNGDMISKEKLANECKLSRNAIYNYENGKRTPTISTLEIIAHSLNLYISDLLEDSDNTHYSNKLGILNAIDKDVENNILAAEEKRVLFEQEMDELDKKYFFDLFNRKTSRMSPHEYFKFILSICPFSESDHISEEDMEELSVLFYRLVTLKAYERDSLNEMEKIIPGQSKKYEKNRFVTTCTK

SEQ ID NO: 67 - protein, 343 aa, Clostridium beijerinckii
MMISEVIRHYRKKENLTQEQVADYLNVSTPAVNKWENGVSYPDITLLPPLARVLKIDVNTLLAFNEELTDTEVKKLTKEVGETASKEGIKKAFEKGNDLIKQYPGCDELILMISEVLRIYLLGLQIDEKEKYERKIIAWLEIVAAGNKEKTASMAKIDLSAIYREKKEYEKAQEILDKIPEVDVDKKIQQAVLFESMGKTDEAYGIYEDKLRKNGHETFAVLSLIIRLLYKEKKFREAEEYIERAKKIAEVFDLGAYHKYELDLWHSIERQDSERTIEAIINMVNEASTMDDSIKSKLYSHMKFDVTNNWTKDRYKDLVKRVLRKRKNIDFVKDDPRIKSLLE

SEQ ID NO: 68 - protein, 117 aa, Clostridium beijerinckii
MLGDKVKLLRKERKITQQKLAEAIGVSQSTIGMIEGNRQGASNDTLIKLANTLNTTVDYLLSDNIEELDFPDKRISDPGFGDDDIRRIERARRKMDPKNKEKMMKILRSAFDEYFDD

SEQ ID NO: 69 - protein, 112 aa, Clostridium beijerinckii
MINLNNINYIDIGKRIKAERERNGLTREKFSELVSISPTYLSQIELGQRHPSLPTTIKIASTLHISLDFLVYGERALNVNKDDLIDIINHAHEKDLYVLKEILTAILPSVKY

SEQ ID NO: 70 - protein, 119 aa, Clostridium beijerinckii
MGLKENIKNRRLELNLTLEDVSKRLSISKPTLQRYESGVISNIPSDKIEKLAVILETTPSILMGWDENKIKTRLQLSEELECLLKKYNSLDNLGKHTVNTVLEMEFNRCSQLNNQDRIF

SEQ ID NO: 71 - protein, 226 aa, Clostridium beijerinckii
MSFQEQLQTLRKAKGLSQEKLAEFLGISRQSVAKWEVGQSYPDIARLIALSEFFKVSIDKLVNDYEENCRLSIEENKVNNINRNIIDFLCRAKKATYAGNGGECKSSRPNSHDLEYVEGNLKYIDTYLGGERFSGEEGLWQDDIPFWSMNYTGRVLDERFSGSFLKEALSLVTEENPYRGPIIYQNGQYKYHCIINGEFKWFQGHEEIYFGNIKVYECYFHGGSIK

SEQ ID NO: 72 - protein, 123 aa, Clostridium beijerinckii
MKTIGEKIQILREERNLKQKELAELAGITEATLSRYENGKREPKGEIISKLANVLNVSTDYLLGRNDIITSSVEPTGNLAEQVGLKLIKELEKDGYKIEEKDLPNLILAAKITLAQNKKNQDD

SEQ ID NO: 73 - protein, 113 aa, Clostridium beijerinckii
MATFADRLKEERIQKNLTQTELAKTLYLGQTSVSKYESGKQIPEMPTLQKIADFFEISIDYLLGKTDIRNYTDDPNITIALHSDTDYDELPKEAKEEINNFIEYIKQKYKDKK

SEQ ID NO: 74 - protein, 421 aa, Clostridium beijerinckii
MEILSTGEKIKRARVFKGITLKELCGNKISIAKMSCIENGKIKADTELLNYIAEKIEIDVDYLIEDVYEQISNNLNIIKRNVSSDTDSESKLKDNLSYALKYKYYDLAFELIHILFSYYVEENKVENIQLIVSQYYDLYQRNNTEENTAIYFKDMARYLSQNGEYIEAISYYSKLREMFRLKEDGFDSSEYCLIGYNEALCYQNLRKSEEAYSILSEIIGYVDDLKTDESKGKIYHIYATVCIKLKKDYVDEYKMKAFQYQKYNPISLAASHGNYGKYYFEVEEKEKAISEIEDGIKIFPQDNVEKYVEFLNYCTRILIDNSEYEIAYRITEESLNLAIMTDNIKLIEKSYYFKGIILQKMDKHLEAEKYMNLSLDSLFKFGTREERRNRYVDMGKLYYKLGLTADSLKYFNLALAVDKKI

SEQ ID NO: 75 - protein, 119 aa, Clostridium beijerinckii
MGLKENIKNRRLELNLTLEDVSKRLSISKPTLQRYESGVISNIPSDKIEKLAAILETTPSILMGWDENKIKTHLQLSEELECLLKKYNSLDHLGKHTVNTVLEMEFNRCSQLNNQDKSF

SEQ ID NO: 76 - protein, 184 aa, Clostridium beijerinckii
MRNLNSIIGSKLKEIRNKRELSLDEAAKLTGVSKAMLGQIERGQSNPTVSTLWKISTGLKVSFSFFIDEEQDELEIVDQNNIDPIIEDDARMKLYPIFPFDANRGFEIFTIELESGCNHVSTPHSDGVEEYIIVTQGEVEIDIDDQKYSLQKGNSIKFVANIPHKYRNVSREKAIFQNIILYFR

SEQ ID NO: 77 - protein, 120 aa, Clostridium beijerinckii
MIRLRKLNNLTQKELSLTIGISKSSISKYERGELFPTKEQSIKLASYFNINSKYFYDPYLESMDNFHQYLSTVLNKNIHINKDKLCKSLDISKRTLYRYCYQNNVPSRNIFDRMESYLNT

SEQ ID NO: 78 - protein, 183 aa, Clostridium beijerinckii
MNLNNIIAGNLKRLRNERQLSLGKLSDICGVSKVMLGQIERGESNPTINTIWKIAGGLRVPYTSLIDEPIKNDLLIKKEDSRHQESPDNKYRVYCYFASNSNRNFELFTVELDGNSTYESNSHGEKTQEYIIVYDGELSLNVDNITYVLTPGDSIVFDSSKPHSYTNLTNSMIRMTIINYYIV

SEQ ID NO: 79 - protein, 288 aa, Clostridium beijerinckii
MNKDLYEFKEINEKIKKKLNYIKADSDIMYNNINEVKALKNDIYEKTSKVFTYNLRKLIQLESTQKKLAGKIGISEDLLSKYKSGDAFPSIETLLYISEVYNITIEKLISIPLTAEDIENLENNNEIGSYIFEEKYYVYFFVTNIAKEGSLHEGIIEIKNENVNFKICSDDKVIKYFTGKYIVSDKMIFFNLSSSNDGVTYINMIKPNLNKNKYTGGVAMMMLPSDANSKPCVQKILFSKIKLNRELYYNNLKEILNFKIDGVNLGHVKLSQWEDEAAYNFILKVLLT

SEQ ID NO: 80 - protein, 68 aa, Clostridium beijerinckii
MKNLKMKSARASMDLSQEQLADIVGVTRQTIGMIEAGKFNPSLQLCIAICKALGKTLNDIFWEDDDNE

SEQ ID NO: 81 - protein, 78 aa, Clostridium beijerinckii
MKNKLKEFREAVGLTQEQLGALVGVSRQAINSIETEKYEPSIWLAYDISQIFHCAIEEVFLFEQSERKSRAQLSRGVV

SEQ ID NO: 82 - protein, 68 aa, Clostridium beijerinckii
MEELVLHNNLKEVRTEQKLSQSQLAEMVGVSRNTISSIETGEFNPTAKLALVLCVALDKKFEELFYFD

SEQ ID NO: 83 - protein, 247 aa, Clostridium beijerinckii
MSFGNNIKKCRLDKGINQKEFAKILGIPVSTLANYENNHREPKTEILIKIADALLIPIDELLDSETTSFSSNLITSMLQMEHITIVDASEEYGFKAISRDSGVNINYLRNCIEENIELAIEDQLKLIEFWSKYKSWDDGIEFEDFIRKNEKKINKNPIISKKIKDILNIGMQKNDTEKLFDLLEKYDFKINISNKDDENIISIYNNENPIITESESKLLPIYNEIINKIDSYAKFIIEDELKKLKKD

SEQ ID NO: 84 - protein, 69 aa, Clostridium beijerinckii
MQTRIQELRKEKKITQGELADAVNVTRQTIISLENGRYNASLILAHKIAQFFEISIEEIFIFDKEDENL

SEQ ID NO: 85 - protein, 68 aa, Clostridium beijerinckii
MKLTPIRLRRLNSGLDSEEVIEALKISKSTFYKLEQGWTRPSPALIKRLADIYKCSTDDIFRDLKITG

SEQ ID NO: 86 - protein, 67 aa, Clostridium beijerinckii
MTYSKLKVERVKNNKTQDDLATDAKVCRTTISQIENGRVDNIQLGTLKKIATALGSSVEQLFLSNEN

SEQ ID NO: 87 - protein, 68 aa, Clostridium beijerinckii
MKNRLEEIRKKHGIKQEELAIALEVSRQTIGSLENGRYNPSIILAFKIANYFNMSIEEIFIYEEEQIK

SEQ ID NO: 88 - protein, 272 aa, Clostridium beijerinckii
MISKSKELGLFLKKKRSTLRPEQFGLKFDKKRRVKGLKREEVADLAGVSIDWYVRIEQGQDVNPSIDVLLSLSRVLQLNNEEKRYLFNLSDKKLPVEDFAAVAISNTLQKFLDNQNPSIAYVTDSKLTMIGWNMAALKVYGNYEEMDEKERNSVWRAFNDDYLKELLDNWEGHSKLRVEQLRANYGYYENDNTINAIINELNEKDPLFNKWWNNQGIMGTPEGQKLLHHPLVGDLYLSYISFRSTEIEGASITIQMPIDDETKNKLKQLILE

SEQ ID NO: 89 - protein, 307 aa, Clostridium beijerinckii
MKNKMENKNYLYNNYINMARNLRSENNLLKAISFYQKAYALNIGKEDIELLMDMALIYDEIGLSGDAEKKYREVIELDEDDARAYYGLAIIYDENDELEKAKNYYEKAIEKNPNYDKAYFFLANIYDESGEKDKAISNYKKVIEINPNYMWAYANLACILEENNENIDALNYINKALEIDDRHYKILFNKAVILNKLNKIEESKEYYYKSIEENPNYPYSFLNLSVEYREEGNFKKAIEVISKGIEENDDEGFLYYNRACYYVNINENLKALRDVEKSIELNEFFLEYMKKDKELDPIRGLEKYKNL

SEQ ID NO: 90 - protein, 222 aa, Clostridium beijerinckii
MSRVGENIKQAREKSGLTVKALAKKLGVAEKYLNEVEMGRKVAPESLIDKAGKVLKADLNDISMVVTDEVLMEERKTLKEIPKRNVESSEVWTDAFSSVLRSVPIYDYSLSNKKGSKEMPIHSNKIENYPQDKVFYLEIEDDEMNGFRMLKGDVAFAHAVKDISNSGFFLIDYKGKRKVRQIKVLGNSKLLLVSNAGSLLTETMELKEVDVIAKLERLEITL

SEQ ID NO: 91 - protein, 139 aa, Clostridium acetobutylicum
MLHTICPPTSKRVAMNTSNEINLKIQKKLCSNIEAYNKMSKEEILSKIHELDAEWDIERILETNAASIILLSIAAGLIKKNSGYFKFAGIVSGFLLQHAIHGWCPPLPLLRKMGIRTQEEIDEEKFHLKRLWEKKFDKL

SEQ ID NO: 92 - protein, 57 aa, Clostridium acetobutylicum
MLELRRLISSLNFNTILISNGESIACMYKFMLFLSYKKYKVDISFIFIIDTILTYDN

SEQ ID NO: 93 - protein, 656 aa, Clostridium acetobutylicum
MYKKLFEKGKIGELELKNRIVMVALAVGAAKSDQTIGDDMMEYYLERARGGVGLIIAENTRVNDENGVAARRQVSVARDEHIAPLKKLVDALHSENTKFFVQLHHPGRETYSNLNGDKPVVAPSAIPCGVCKQETRALETSEVEGIIQDFINGAKRAKKAGVDGVELHAAHGYLISQFLSPYTNKRTDKYGGSFEKRFNFVKEVVLGIKNACGQDYPISVRLTVDELLNLNGVKQEYLDLNMGIKICRELEKIGVDVINVSNGIYETFNSLSEPMTYDQGCRTERIKAVKEAVEIPVIAVNMIKEPWFAEKMLEDKLVDFIGLGRALVADSDWPKKALEGRDEDINRCISCTFCFETLLDQVIPNVGPIKCAVNPRAAHEFKYKEFNKNGADKVVAVVGAGVAGLEAARVLKIRGFKPVVLEQSADVGGQINVADKPPRKEKIDWIVEYEKTQLNKMGVEIKLNTKVTLEYLKKMKPYAVFIATGSVPLVPKSIKGIDRENVYTIDDVLTGKVKIIDKKVALIGSGSSGLETAEFLCINKNDVSIIEMQDAIGKGVYVQHYLDAMDKLSKFKVNYMPSNKLLEVTNKGVKLENIVERRIVDYDTDYVVLSLGVKANNDLEALCKAEFENVRVIGDAAAVGRIESSVRSGFEAAFWL

SEQ ID NO: 94 - protein, 184 aa, Clostridium acetobutylicum
MDSINLMVEEHTYIKRMLIVVRNASINILNGGKIDYDDFYKMIDFIRNYADKHHHGKEENMLFNKMVDELGNPIEKVINMGMLVEHNQGRSFIYDLEEALKRVKNGDDDSKVDVIANAVSYENLLKRHIEKEDSTVYTFASKNLSRETLDKINSECEKFEEIESKNKVQEKYIKLLEDLEKKYI

SEQ ID NO: 95 - protein, 421 aa, Clostridium acetobutylicum; identical to SEQ ID NO: 25

SEQ ID NO: 96 - protein, 865 aa, Clostridium acetobutylicum
MDVDKLTLKVQQAINDCQTIAVRYNHQQIDTIHLFMAIISQEDGLIPNILGKMGADVETVKRDTEAELDRMPKVLGEGAQNASIYATRRFEEVFVRGEKISRDFKDLYISVEHVMLALMDIDSGAIKSILDKNNISKKEFLKALREVRGNQRVDTSDPEGTYDALNKYGRDLVKDAKKHKLDPVIGRDEEIRRVIRILSRRTKNNPVLIGEPGVGKTAIVEGLAERIVRGDVPEGLKNKIIFSLDMGSLVAGAKYRGEFEERLKAVLKEVERSEGKIILFIDEIHTIVGAGKTEGAMDAGNIIKPMLARGELHCIGATTFDEYRKYIEKDKALERRFQKVQIDEPTVDDAISILRGLKERFEIHHGVRIHDNAIVAAAKLSDRYITGRFLPDKAIDLIDEAGAMVRMEIDSMPTELDMLKRKIFQMEIEKEALSKESDKFSRERLESIQKELSDLKDKDKAMTAKYDKEKAQIQGIKELKTKLDEIRGQIEKAEREYDLNKAAELKYGEVPKLEHEIEEKENLIKQNGQNAMLKEEVTEEQVSNIVSKWTGIPVSKLVEGERNKLMRLSDELEKRVVGQTEAVKSVADAVIRARAGLKDMSKPIGSFIFLGPTGVGKTELAKTLARVMFDSEDNIIRIDMSEYMEKYSVSRLIGSPPGYVGYEEGGQLTEAVRRKPYSVILFDEIEKAHSDVFNIFLQIFDDGRLTDNKGNTIDFKNSIIIMTSNIGSEHLLNNKGVSNVDEETKDKVMNELKGRFKPEFLNRLDDIIMFKPLSINEIGKIIDIFLENIKSKLKEKNIKIDIAEEAKKIIAEEGYDPVYGARPLKRYIENTIETHIAKMFISGEISEGDILKIEGSDSKLTIVKK

SEQ ID NO: 97 - protein, 41 aa, Clostridium acetobutylicum
MGNMNSRVKKLLFLVLCSFIIIGYLSVNHISVLASYPGWSW

SEQ ID NO: 98 - protein, 352 aa, Clostridium acetobutylicum
MEKDILIELKNVSKKYGENYVIKNLNLFVRRNEFLTFLGPSGCGKTTTLNMIAGFETPDEGNIIFEDSSINIVPPHKRQINTVFQKYALFSHMNVYENVAFGLRIKKLPEKQIREEVEKMLSLVDLKGFEKRSTDSLSGGQQQRVAIARALVNKPKLLLLDEPLGALDLKLRKEMQLELKNIQQKLGITFIFVTHDQEEALTMSDTIVVLNKGTVQQIGTPEDIYNEPKNKFVANFIGVSNILNGVMLHDYKVKFDDETFDCVDTGFNENEDVDVVVRPEDIKIVSKENGKLFGKVISAVFRGVHYEIKVEVKNTTWIIHNTKHVRVGDSIGLDILPDDIHIMRKEKIDEEA

SEQ ID NO: 99 - protein, 273 aa, Clostridium acetobutylicum; identical to SEQ ID NO: 26

SEQ ID NO: 100 - protein, 81 aa, Clostridium acetobutylicum
MEVITLFIIKNNKKSDILFVEYVTTRTNYDTLGLPITKLTIGKANIIVNDANARILVLPKNIFFIELPPLEIIISQKCDIL

SEQ ID NO: 101 - protein, 183 aa, Clostridium acetobutylicum
MNGNFKNRRFMYSIGSVILIVLVAAVGFMKMDLYKDNSFNVSQAQSLQVAHEITKMNITTVKKNDAYDKSNFYVSKALGIVITFPQDWSGKYSVSESFNRLDINFKGQKGSGLLLIICRNSPDFKSQCWDTIDGKNVINVGGNEYFVGGPTGLTIAETDPNFKDFMKMHSELPQVVNSIRVFK

SEQ ID NO: 102 - protein, 56 aa, Clostridium acetobutylicum
MYIIKKFTLKGYSGKIIHNYGVNKYLYIKYFGKYIGIIMHMFLHNFYKIYEGNDLR

SEQ ID NO: 103 - protein, 150 aa, Clostridium acetobutylicum
MALRQIRLSEDEILRKKSRPVEVVDDKIRQILDDMLDTLQNTENGAAIAAPQVGILKQLVVIATGEDIIKLVNPKIVKKEGEQEVVEGCLSIPNVYGKLKRPKKVTVEALNENGEKITLTGEGFLAKCFCHEIDHLDGILFTDLVTEYIK

SEQ ID NO: 104 - protein, 136 aa, Clostridium acetobutylicum
MDLSNYIKKQNIYSCMFILVGIAALGIGFFLGYEKKLMFGIALGCIPVGLGSFVVYKLSEKRIDMMKNVELENEERNVFINTKSGQKAFWISYYYIIAIVILKNVISLSIDRFLIITLFFMPLVYFLCVVFYHRKY

SEQ ID NO: 105 - protein, 136 aa, Clostridium acetobutylicum; identical to SEQ ID NO: 104

SEQ ID NO: 106 - protein, 755 aa, Clostridium acetobutylicum
MYKKSTEEYINVIGARERNLKNVNVKIPKRKITIFTGVSGSGKSSLVFDTIAAESQRQLNETYSSFIRHRLPHYGEPKVDAIENLSVAIIIDQKRIGGNSRSTVGTITDIYSLLRLLFSRIGNPFVGYSDVFSFNNIKGMCTKCEGLGKVDMISIDKLLDKNKSLNEGAILFPTFEPGGWRLKRYIYSGFFDNDKKIKDFTEEEMELLLYKSDIKVTTSDPNWPKTSLYEGLIPRIERSFLKKEEGEAIKYKKQISKIVSRETCPICKGARLNNDVLKCKINNKNIWDCSEMQTIDLLNFIRGVYDPKGITIVNEIVNRLEQLVSIGLGYLSLSRETSTLSGGESQRIKMVRQLSSSLTDLTYIFDEPSVGLHPHDIDKINILLKLLRDKGNTVLIVEHDPDIIKIADHVVDMGPKAGVNGGKIMYEGTLDGLLQSNTLTGKYLHKGSQVKGKVREPKGWLSLKDANLHNLKNISVNIPIGVMTVVTGVAGSGKSTLISQVLPKFYPNTIFISQKPIQASKRSNIATFTGIFNGIRELFSKANHVKTSLFSFNSEGACPNCKGLGVTYTDLAFMDTVITTCEVCQGRRFTDEILTYKFGGKNISEVLNMTVEEALDFFNEKEICDILKRLVDVGITYIKLGQSLNTLSGGELQRVKLASELESHGNIYVLDEPTTGLHMSDISQLIKVINRIIDNGSTVIVIEHNLDVISQADWIIDLGPFAGQNGGEIMFEGIPSDLINSKRSITGKYLSKYIQ

SEQ ID NO: 107 - protein, 254 aa, Clostridium acetobutylicum; identical to SEQ ID NO: 44

SEQ ID NO: 108 - protein, 95 aa, Clostridium acetobutylicum
MLEELEDMNCFTKDMYKFLDYLSEDEEYEVRVKVSEILVLSNDVEGDNILIKLLKDKEELVRVNACDSLCNSSSNDVIYHLKDRILKDKSSLVKG

SEQ ID NO: 109 - protein, 208 aa, Clostridium acetobutylicum
MYKILIEEELNLKAYEGIINFAVSKSDACMLVIYRYGEEEKISNPPRRNDYNNEEDYLMFLNCLERMKKERYDNLDIFKKSTEPLLEKIRPYLIKKRNFPTEWPGVKVVFYSKYTSVDICVYSICKELETYLLEAKGLFNWKYPYFPDDLCFFKNGYCWFSVVAHEEYACIYIEDAQDIEKLLKIGVKFKVTECNKDEVKLFYEDYSI

SEQ ID NO: 110 - protein, 307 aa, Clostridium acetobutylicum
MNSLKRLLKCVITLVCILILISGCSKDISTFGKDTNISGRISNSQFKVHYIDVGQGDSILVQDGDKNMLIDTGTNESQNYLISYLKKQNIKEINYMVLTHPHEDHIGGADKVIKNFIVDKIYMNSVSTNTKTFRDLIYAMKEKGLKADEPDSENFKLNKADCNVYGPVNPTEGNLNTYSIVVKVTYGQNKFLFTGDTQSSNEEAMIEKGYDLKCDVLKIAHHGSRTSSTDDFLNYVSPKYAVISCGRDNDYGHPHKSTVEKLKNRNIPLYRTDENGTIICVSDGSTIKFSCSPGDYKMGSRKNRYSK

SEQ ID NO: 111 - protein, 101 aa, Clostridium acetobutylicum
MDSGNRYNSSFMDGSMKVNAEEIQAMAKRYKELADKASTILNSLNSTIDEMKQNWKGKSSDTFVSNYDGWKSNGRRYVNEIDRIADELKNASERFREADRR

SEQ ID NO: 112 - protein, 678 aa, Clostridium acetobutylicum
MKVRSIRTRTLVSVLPVIIVILMVLVSISYYFSRNMLTKEIDSKITNNINQLKETISGKLQAHQRVAETLARTIEADNFTIANNDYSGLLSKYAMINEDTLGAGIWYEPWKFRSDLKYFGPYVYNDGSKAVYTDSYMTSDYDYPNQDWYKDSKNSKVNWTAPYYDPTTKVTMSTTAVSFYDKNNNFLGETTADINLNKLQAMINNLKVGNTGRAFLVTKDGKYIAGVSSNKVMKETIKNDSKFSNISEEILSGKSGSSKYRDGSDKRLIYYTSLGQTNWVLAITISEAEIYKPLSNLLNILIILSVVMIALVSITIVIYSNYITKSIVKVNELSKKISEGDLTSTIEVTSEDELGSMTRNLNTMAENLKEVFRTFGMNLDSIVGTSQELTASAEETESASEQVAVTMQDISGQVELEANSTREISGEVEKINAAIKKIKDSISETFSLSDSASKAAENGDKIIGEAIEEINKMSSNVNETSIMVGILGDKSKKIDNITSIINDISSQTNLLALNAAIEAARAGDAGKGFAVVAEEVRKLAGESSKAADEIGILIQDIQREINSTIESMKNGAFAVEKGSELIKNAGNSFDEIVSSVRNVSDNINKVVSEVDGIYINSNNMTDNVSSIASSSDATSDNIQSVAAASEEQSALMKQIVEASEALTQIVINVQGEINKYKI

SEQ ID NO: 113 - protein, 304 aa, Clostridium acetobutylicum
MPLSYYEKGIMYKRKNFMGPAVKCFEEARKLEEKVGSKASLELAKIYAYFKDYEEAYKYCKEAISKSNYIEAYYLMVRILLLSNTPINEILKKAGKVKIHNSLLADIFCFEGNYEVALKIIDTCLKEDEVTRDLELIKIKCLLKLKQYDKCKDYIDNFSQSYLYFFKIRMYKVICCVLLEEYRLAWKIIDEFDYKKLSLYNKNKLKAYINFYNAALDIRGITPHENDEEYYSCIFEIIDILLATKEIKCLKKLIQTISKYDGGYLELAELYSNYGYVSEAKKLIVLYIKKFEVVNNKMIYILQK

SEQ ID NO: 114 - protein, 119 aa, Clostridium acetobutylicum
MGKNEEAKEAYKEAIKKYNFLIIKYPYDVKLNFFKANCLRDIEDYEKAEELYEYIIDLDNDALEVYLMRARNRISLNKYEAAKEDLNTVIKLNPAYRKVIELDEQLKEFLSGKSESCYR

SEQ ID NO: 115 - protein, 112 aa, Clostridium acetobutylicum
MNIQIFGTKKCFDTKKAERYFKERKIKYQFIDLKEKGLSKGELNSVKASVGLDNLINAKAKKYKALNLDKIRTASVKEEILLDNPEVYVTPIVRNGKNATVGYKPEVWKEWS

SEQ ID NO: 116 - protein, 108 aa, Clostridium acetobutylicum
MATNSDQIKIDVLNINSAISALNKIVNDEETANSKLKTVAKNVGDDLKCSAVSTLTEKINKCVNDLNSQIESLKNSTNDVKQIVSDFEDADKRIAQSENLNGSTVYRR

SEQ ID NO: 117 - protein, 307 aa, Clostridium acetobutylicum
MISNEQYVRLSLELNLFFLRIVKEHNVIAGASLPPKYAPTLMEILAVNKKLDMLLSKTVALSKGNISREAMNSSTLITPLTLPSEKVTSALTGVPINTAITSKEISLGYRDYYRTGINMVTAVSILNKAILPLVNFVINFQAGLLSKIMSCKAFSYTYPSNIDHVIREARAYVNMLNMLERKQEMDTTPQGIIRQEIFWNDIMEDHAEFIRGYLDPSQTSLFNTANNFVRRFDDIENATESLTNNPSNLNNITRNIYSLVTEFRNFKSTATKGLLACKIKAIMAPLLADHVTREANYYLRLLRSFTS

SEQ ID NO: 118 - protein, 862 aa, Clostridium acetobutylicum
MKVTTVKELDEKLKVIKEAQKKFSCYSQEMVDEIFRNAAMAAIDARIELAKAAVLETGMGLVEDKVIKNHFAGEYIYNKYKDEKTCGIIERNEPYGITKIAEPIGVVAAIIPVTNPTSTTIFKSLISLKTRNGIFFSPHPRAKKSTILAAKTILDAAVKSGAPENIIGWIDEPSIELTQYLMQKADITLATGGPSLVKSAYSSGKPAIGVGPGNTPVIIDESAHIKMAVSSIILSKTYDNGVICASEQSVIVLKSIYNKVKDEFQERGAYIIKKNELDKVREVIFKDGSVNPKIVGQSAYTIAAMAGIKVPKTTRILIGEVTSLGEEEPFAHEKLSPVLAMYEADNFDDALKKAVTLINLGGLGHTSGIYADEIKARDKIDRFSSAMKTVRTFVNIPTSQGASGDLYNFRIPPSFTLGCGFWGGNSVSENVGPKHLLNIKTVAERRENMLWFRVPHKVYFKFGCLQFALKDLKDLKKKRAFIVTDSDPYNLNYVDSIIKILEHLDIDFKVFNKVGREADLKTIKKATEEMSSFMPDTIIALGGTPEMSSAKLMWVLYEHPEVKFEDLAIKFMDIRKRIYTFPKLGKKAMLVAITTSAGSGSEVTPFALVTDNNTGNKYMLADYEMTPNMAIVDAELMMKMPKGLTAYSGIDALVNSIEAYTSVYASEYTNGLALEAIRLIFKYLPEAYKNGRTNEKAREKMAHASTMAGMASANAFLGLCHSMAIKLSSEHNIPSGIANALLIEEVIKFNAVDNPVKQAPCPQYKYPNTIFRYARIADYIKLGGNTDEEKVDLLINKIHELKKALNIPTSIKDAGVLEENFYSSLDRISELALDDQCTGANPRFPLTSEIKEMYINCFKKQP

SEQ ID NO: 119 - protein, 376 aa, Clostridium acetobutylicum; identical to SEQ ID NO: 51

SEQ ID NO: 120 - protein, 225 aa, Clostridium acetobutylicum
MFKHEKQLLNGMQVKVERENPQYAVLMQEQLGGANGELKAAMQYLSQSFRVKDQALKDLFLDIGTEELSHMEIVAETINLLNGHSVNYEVVGVGEVESHVLSGLTPFLVNSSGEPWTANYVSVTGDIVADLLSNIASEQRAKVVYEYLYRQINDKEVRRTIDFLLNREEAHNALFREALNKVKNEGSNKDFGVTEDSKLYFDLSTPGRYVQDPNPTEPSFSNPRR

SEQ ID NO: 121 - protein, 303 aa, Clostridium acetobutylicum
MRVKKAIIPAAGLGTRFLPATKAQPKEMLPIVDKPTIQYIIEEAVQSGIEEILVITGRNKRAIEDHFDKSFELESELESHNKKELLKVVKDISNLANIYYIRQKEPRGLGHAINCARTFVGNEPFAVLLGDDVVNAKVPCLKQLINCYNEYKTSILGVQRVPNSEVSKYGIVNGMHIEDGVYKVKDLVEKPKQEEAPSDLAILGRYIITPSIFDILDNTKPGKGDEIQLTDALKTLMKTEAMYAYVFSGRRYDVGDKLGFLQATVEYALKREELKKPFMNYLFTIKDNPNFKSLYDELNKKSK

SEQ ID NO: 122 - protein, 85 aa, Clostridium acetobutylicum
MDPKVIDIIKIIIGILGVAASIVFLYFSIIHNYQSKEEETIEVPDINEDVKSYKEVDGLDTVILNNPDDTFVIDKREKDDSTVCL

SEQ ID NO: 123 - protein, 1507 aa, Clostridium acetobutylicum
MTRNIGYPEKQGLYDPAFEKDNCGIGFITSIKGEKSHDIVKKGIEILVNLTHRGAVGADTKTGDGAGIMLQIPDEFFRINCDNLGIELPESGKYAVGMIFLPKETALSYQCEGILERAVEEQGQKVLGWRVVPRDNRSIGETAKGSEPVIKQIFIGSNCENQTDFERNLYIIRKRAESEVKRLVERGSEYFYICSLSSRTIVYKGLLLADQIKSFYMDLNDINFKSAIALVHQRYSTNTFPTWDLAQPFRFLAHNGEINTIRGNRNWMNAREGVLKSDVFGKKISDLFPIVNPKGSDSTSLDNTFELLVADGRPLAQALMMLIPEAWENNESMETWKRAFYEYQGTLIEPWDGPAAVAFTDGQQVGAVLDRNGLRPARYLITKNNIAVLASEAGVLKFEPEEIAYKGRLKPGKMFLIDTKEGRIIDDEEIKKSICLDKEYEKIVEKNKFTLDDFEATVGEEVVNDEVLKEKQQAFGYTLEDLRVILGPMAATGKEPLGSMGNDAPLAVLSNKSQLLFAYFKQLFAQVTNPPIDPIREEMVTSLVNYIGSQGNILNKDTEAVPFIEINSPILTDLEMEKIKNLRNKDFKTTTIPITFKYDTGIDGFKEALEKICERASKRIEEGFNVIVLSDKHIDSYEAAIPSLLALSAVQHHLIKEKTRTKVSIVVETGEARETMHFALLVGYGATAVNPYIAFESIRQIVREKDIEVESQEKAIENYIYAINHGILKILSKMGISTLRSYHGAEIFEAVGLSSKLVSEYFEGTPSRIEGIGIDEVAKEVLNRYKNAFNKIRKPVSVLSVGGQYSWRKNGEYHLFNPDTIYRLQVSARTGNYKMFKEYSHIINDQDKNLCTIRGLFEFKDLKPIPLEEVEPVNEILKRFSSGAMSFGSISKEAHETIAIAMNRIGGKSNSGEGGEDNERYKADANGDLRRSAIKQIASARFGVTAEYLVNADELQIKMAQGAKPGEGGQLPGRKVDVNIAKVRHSTPGIDLISPPPHHDIYSIEDLAQLIFDLKCVNPSSRISVKLVSEVGVGTVAAGVAKAHADSILISGHDGGTGASPISSIKHAGIPWELGLSEAQQVLLLNNLRSRVVLQTDGQLKTGRDVVIAALLGAEEFVFASTILVSLGCVMLRNCHLNTCEMGIATQDPELRKRFKGKPEYVINFLTFIAQEVREYMAQLGFRTINEMVGRVDKIQAKNAVSHWKAKGIDLSKILYKPDMPKRIKPYCTVAQEHGLDRIMDYKLIQIAKDALNSKKSVVGNFEIKNVDRSVGAMLSGKIAKIYGENGLPDDTIRFNFFGSAGQSFGAFGMKGMTIVLEGEANDYVGKGLSGAKIVIKTPERASYKQEENVIAGNTILYGATSGKLFINGMVGERFAVRNSGAYAVAEGTGDHCCEYMTGGIAVVLGETGRNFGAGMSGGMAFILDENDTFNDKCKAETLEITSDYDEEDEKVLRGLIEEHYNYTNSDKAKVILENWGEYKTKIKKVIPTAYKLILEKSKQKAAAVNM

SEQ ID NO: 124 - protein, 421 aa, Clostridium beijerinckii; identical to SEQ ID NO: 74

SEQ ID NO: 125 - protein, 308 aa, Clostridium beijerinckii
MNKMNAINIENLNKYYDGKINALNDINLIIPKGEIFGFLGPNGSGKTTTVRILNGILSATSGHAEILGIPVLKNNIEIHKLCGVMTESSSCYENLTAKQNLMFFGKMHGVEENVLNERTDSILKRLELLEVKDKKVKSFSTGMRKRVSLAIALVHNPKILFLDEPTSGLDPENALNVTKLVKELAEENEVTIFLCTHQLKYAEDICTQYGFINNGNILGVGTFDELASKKNAKLQLKIRGKNISDKFGFVYEGNDIYSKPISGDQEVNTLIQSIMKDDGEIYEAMQQKWSLEQLYFKYIKGTSDDVSL

SEQ ID NO: 126 - protein, 106 aa, Clostridium beijerinckii
MNWLGILPILMGVVYLIYSICDRDKITYYNRRFARKTAMTIIKPREFFRMQLKFAILNSVYLAVAGIVIITFNISNIFVILSIGGFHFINLILVIQSKMKGYTYYE

SEQ ID NO: 127 - protein, 392 aa, Clostridium beijerinckii
MAKRSNGEGSAKWVTRNGKKYWCIMLTTGYDPLTGKQKRNAIYGKTQKEAKEKLKEFQDNFVNNSDNSTLGNFYYDWLWNIKRPSLKDSTFEKWAGIYRNYIKPNKKLNDAKLSEIDTLSLQKITTALLKNHTVSQIKTMNRCIGNCFNYAKSINKIKSNPVDGLIYPKNHNVIEEKENYISEADQKRFIAALETDELQGIILMGLMCGVRLGEAMALQTNAIDFNHMNIKISKSVKYVWTGERDKDGKKIYENKVTIPKTRTSIREVPLPDVLKPIIKGLIKKNMENKLKFGELYLDNSLIFCKENGDYIDSKKPNRHLKTALKKAGIKTDIHYHSLRHIFITNCLSKDINPRTVMDWVGHTDIKMTMLVYAEINKDKNKKEYEKINCMFD

SEQ ID NO: 128 - protein, 120 aa, Clostridium beijerinckii
MGLKDRARKLKSDILAVYIALGKKETPVIAKVFAMITIIYALSPIDLIPDFIPVIGLLDDIILLPILIAVTIKFIPEETLSKCKIEAENLWISEKPKRWYFAIPILLVWIALIFLTLKLI

SEQ ID NO: 129 - protein, 219 aa, Clostridium beijerinckii
MSTSTIRYTHIKRIVNDIYIKLNISKFPINVFEIIGSFDNIKIVSYHRFMLDHNLTKEETFEILTSDEGCTDYFKPLNKYIIYYNDLDFKSDERIRWTLTHELGHILCSHYSSDNTKIFDDYLSESEYKIMEAEANYFTGLLLSNPIILHKLNIRSSHDIETYCSISSEAARYRYKFYKKWCENNILTSSDRFIIRNFQSYLNAQRLEYLEFISFINSF

SEQ ID NO: 130 - protein, 289 aa, Clostridium beijerinckii
MILNRNDLCWCKSGVKYKNCHLEFDKKLSDLKRKGHIVPTRDLIKTKEQIEGIRKSAEVNNGLLDLISENIKEGMTTEQIDKLAYDYTISKGGIPADLNYDGFPKSICISINNEVCHGIPSDDVVLKNGDIVNVDATTILNGYYSDASRMFMIGEVSEEARKLVQVTKECVNKGLEAVKPWAFLGDIGAAIQEHAENNGYSVVREFGGHGVGLDIHEDPFVFHFGKRGTDMVLAPGMVFTIEPMINAGSHEIFIDEDNGWTALTDDGSLSAQWEHTVLVTEDGVEVISK

SEQ ID NO: 131 - protein, 515 aa, Clostridium beijerinckii
MLIFIILALIITIFVIKKSKTKLQKTLNETVSNLNKTIREKDDIISELSKYQDIIDVQSKCDELLSTAQNEAELIKKRYETLLTFAQIEAENIKEKSLSAKKQMDEQIKIRKVEYDNILSTALEQSKQIISDANIKAEEIAGDAYKALNNHKELEQKAKAMKNVIEGYGNKYIIPTHGILDELADDFGYTEAGIELKKSRQKSKFMVENGLAAKCDYVENNRKTTAINFVTDAFNGKVDTILSTVKSTNYGVLKQKITDSYILVNNLGEAFRNAVITPEYLQARLDELKWAVAAFELKEKEKEEQRLIKEQIREEERARRDYEKAIKEAAKEEEMLKKLMEKAQLQLQEANDQQKAEYESKLIDLQKKLQEAEEKNQRALSMAQQTKSGHVYIISNVGSFGEDVYKIGMTRRLDPLDRVKELGDASVPFTFDVHSMIFSDDAPKLETELHKIFNKNQVNKVNPKKEFFKVNIKDVKSQIEKMGIQSKWTMLAEAKEYRESLAIENEMKSSEEFAS

SEQ ID NO: 132 - protein, 128 aa, Clostridium beijerinckii
MKISSIIKPNFHTINVNDTIDKALDFMDKLNINGMPVVDDKEIVVGMIVKADIYRFMIHPGHYVSCPVEWVMSKSVISAQSDEDLLTVAKRLRENDIITMPVIEDEKIVGVINIDDLLDYFIDSCSKN

SEQ ID NO: 133 - protein, 240 aa, Clostridium beijerinckii
MGKLRVIGIGPGSIENMSLRALKAIEDSDVVVGYNKYIDMIKDLVKDKELYSTGMKGEEARCKEALNLCKDKNVALISTGDAGIYGMAGLILELKKDEDVEIIPGITASSAAGSVVGAPLMHDNCNISLSDLMTPYEDIKKRVKLAAEGDFVISLYNPKSKGRPDYLRECIDIIREFRQDSTPVAVVRHALREGQSYKLFTIKDFDEDIVDMMSIVIVGNSKSYYKDEKFITPRGYENKR

SEQ ID NO: 134 - protein, 151 aa, Clostridium beijerinckii
MNKKIDERQQQEFYKCEHMAFRIMFSVSVIVIVIQMLFMKAAFQQVLGETVILACGGISMILSCLKSGLWSYNNNEPSVKSNLIYSIICSVVATLLFAIIIYTRAGIKVMTPTIIGGFFGGIFILGFIVLTLLGQVSKNTKKKIENKYKDI

SEQ ID NO: 135 - protein, 150 aa, Clostridium beijerinckii
MALRKIRLFGDEVLRKKSKEVEVVDEKIRQILDDMVETMYNTENGGGLAAPQIGILKRLVVIDMGQGLIKLVNPKIIKQEGSQEVIEGCLSNPHVFGRLLRPEKVTVQALDENGKEIILTGTGDLAKCFCHEIDHLEGILFTDFVTEYLK

SEQ ID NO: 136 - protein, 387 aa, Clostridium beijerinckii
MRTVKQVSDLTGISVRALHYYDEIGLLKPSEITETGYRLYDDEALKTLQQILFFKELDIPLKEIKDIMSSPYFNKMQALENQKKLLILKRKRLNGLIDLINKTLKGEGTMDFREFDMSEYYNVLEEFKTEHEDKVIKTYGSIDKYNEFIEKCKLKEDEIAKAAIKQYGSIERYAKAVKNNLNNITTSSLEEQFDKFKKDCIEDKHPKLKELFKKLTTDLSKNTSSNEIQEIAKEIVNTAKKDYEFFKSDRGDDYWYYMANLYSIYPGWIEVVDKKYGSGASKFIGEVLKKCPGTKLPKIEELYNKLTSDLSKNHYSKEVQEIVHEIADETKKQHQDLKVDDGENYWGYTAELYLSNATYIKVIDEKYGNGASKFIGEALKFYSENSK

SEQ ID NO: 137 - protein, 62 aa, Clostridium beijerinckii
MLIKCNWRTCKNYKDGVCKADSIELKSFDYEEDNEELEGLKCATYEYDSFWMCDKGREVDVR

SEQ ID NO: 138 - protein, 615 aa, Clostridium beijerinckii
MKLIKFTIEEIDICFSALSYMFAELEAREKYKSLLLDINVEFPHKNLDIFSDAIKTFQNAENMFLNFEIVKTLSKLEQWNNLKEYSQTKESEVYYNAFIDKITGNIDKLKDISLIEFADNKQAFLSFVNGNLRALINSTDKKRFAYWNGSTWSLLTDEETQIIYGDFIQKCNIELSAGQGSLKYEDWLELAKKITKWDTGRNTKEALDKIKRESSRIIDLKKYDLNNNIICSNDGKIINLNTGEIKNATRNDMILFTSEYNLVNKEESIKFMSEKMSIYLDIIGNERLDFILDLIAYKMLNRSLQSAIFMIGAGATGKSSLKNIIRDLFKTESSTIPYDYMTTMNRGNSDASRDDILASLDNKKIAFCSEGEEEKIISSAKFKKILSHADESARKTNEGLTNVSLQNLDIVFDTNAMPSFSTMDSAISRRLIFVKFDKPIPIEKRNADYYKDEIFPNFDYVFSYFVYKAIDMIGKKLNIPDCVKNDTSTKLSEVDSLLSFSKRIITPFEGSYIKYSEFEEEYLNFCEEEGLESVIPYSFQDTGNKKNQTKRCNYIINLLKEKEGFSSIYKGKRISDGSSDQKTYQICGITFKDTDDIVPFEDEIEPKEIQQEVLI

SEQ ID NO: 139 - protein, 143 aa, Clostridium beijerinckii
MKKDITAYFALVFGLLLVSIGLYLIKTIIEPQGIMRALPYVCVGLGCGILGHGIGNIISNRVLKNHPDIDKQIKIEKLDERNIAIGNHAKAKAYDMMIFIFGALILTFSLMGVDMVAILLLVFAYLFIVGYGIYYRYKFDKEL

SEQ ID NO: 140 - protein, 295 aa, Clostridium beijerinckii
MRNEEIIRKEVRLIVRELGLLNHNCLNSELTLAQAHILNYIKQNGKTPFNELLINLGIDKASLSRILNNLEAKNYLELKKSEADKRMKDICILPLGIEAINSGDHEANKFINEILNLGDSEDTENIVGAFRLFRVLALKNNLKKNDSRILIERISENYIKEAIELATEVFTNEQSIPEELVPVSENLKPIWWCARVGEDIIGVVSAWKEKDKWHWGRFAVDKRLRGMGIGQKLAIVSLKEIFNSYTDEIYIEARDATLNMLMKFECKVIGEAEDFYGEPVTPIILSKNNFMNRCN

SEQ ID NO: 141 - protein, 177 aa, Clostridium beijerinckii
MRKIIIRLITFVVFITVFTSNLAYAQIPNIPQQYGPKISNLQNKEDIINSLNQIKVIRANLTVYNIKPDTPVDDLKKFDVEIQRYIDQLRIIRTNLVNHADKYSNSISDVFFSEQIVIIATCYIVSLKHQQLLVRAIESNVPEASTLFYSTYMIPIYYYLTLGDEQIAYTQTYTVIS

SEQ ID NO: 142 - protein, 1061 aa, Clostridium beijerinckii
MPELETQISSKVDASIGLLANVPKAILDELGYKYQSQGNNVELTILYRDTQEQTKSFVEGLGGTFQDLGFNFAVVNIPRDKLEQLSMSNSIQYIELPKNLYEQDQESNRASCILQLAPDFDVSGEGILVGFVDSGIDYTHPAFMDSTGTSTRIEYIYDLSTGGNVYNKQMINEAIKSNNPFSVVPSIDNSGHGTHVAGIACGGGRINPMYRGVAPNSSIAMVKAARGTAILSSQIMQGIKFLIDKGKELNMPLVISISLSTNDGAHDGSSLLEQYIRTISNLERVSIVIAAGNEGDAGHHVGGQLVKTQRQIFNIASEEKSIVMNFYKTILPNISVNIINPTSQGTGNINIQEGYIQGTIGSDRYDIYVSGPKPFELNSEIRIILSARSGFLVEGVWTLEINVTNEYLGAYSIWLPVLEGLNPATKFLEPNQYNTLGIPATVDNIIAVGSYNYRTNNLSSFSGRGAQDQNIVRPDLVAPGEDIAGPVPNGGYDNKTGTSMATPQVSGICALMMQWGIVKGNDPYLFGQRLKYYLLRGARRRRTDVTYPNPSWGYGEVCIFNSLRALQNDLNAILTRGNINSRDIQVTNSVPNKYNILRKNIKREVMENTSSGNTSTNIGRLKIQCFRGEDYIPIDGARITVRTPQGAESVNSIQLVTDSVGLTQIIELTAPPLEYSLNPNSNQVPYSLYDITVERDGFNPIVIRGCQVFPTQVAYQICNLTSNSGRGMMRQEVINIQPNTLNGNFPPKIPEDPEKQLPPPSSGVVLPQPIVPEYIIVHQGGPNDPSAPNYKVPFKDYIKNVASSEIYSTWNESAIRANVFCIVSFTLNRIYTEWYRGKGKNFDITSSTAYDHAFNYGRNIYDSISAIVDEIFSTYIKRVGAKQPLLTQYCDGKSVTCPQWLSQWGSQQLAQQGMVPYDILKNYYGNDIELTTAEKVSGSPQSYPGEPLTIGSSGPAVRTIQNQLNRIARNYPLIPKVAEDGQFNQKTADAVKTFQQIFTLPQTGIVDYATWYRISDIYVGVSRIAELRDSSMLRSSLGMNEFIPPIIPGLDNKRGIPKFYY

SEQ ID NO: 143 - protein, 7 aa, Artificial Sequence
  Derived from Clostridium acetobutylicum SEQ ID NO: 97
SYPGWSW

SEQ ID NO: 144 - protein, 7 aa, Artificial Sequence
  Derived from Clostridium acetobutylicum SEQ ID NO: 110
ILILISG

SEQ ID NO: 145 - protein, 5 aa, Artificial Sequence
  Derived from Clostridium beijerinckii SEQ ID NO: 141
IRLIT

SEQ ID NO: 146 - protein, 489 aa, Clostridium acetobutylicum
MTQMNSRKKSIIASLMVAMFLGAIEGTVVTTAMPTIVRDLNGFDKISLVFSVYLLTSAISTPIYGKIADLYGRKRALSTGIIIFLLGSALCGISSNMYELILFRALQGIGAGSIFTVSYTIVGDVFSLEERGKVQGWISSVWGIASLLGPFIGGFFIDYMSWNWIFYINLPFGIFSLVLLEKNLKEKVEKKKTPMDYLGIVTLTLTIVIFLLTILGINENTKISSAKIILPMLVTVLLLFVFYFIEKRAKEPLIPFDIFSKQSNIVNIISFLVSGILIGTDVYLPIYIQNVLGYSATISGLSLASMSISWILSSFVLSKAIQKYGERPVVFISTLITLVSTVLFYTLTGNSPLILVIIYGFIIGFGYGGTLTTLTIVIQEAVSKDKRGAATGANSLLRTMGQTIGVAIFGVIFNLNIAKYLYKLGIRGINVNSLYGSGNVHTGIPLDKVKASLNFGVHTLFFILILISVICTIMSVMLSNSLNKKKNMR

SEQ ID NO: 147 - protein, 330 aa, Clostridium beijerinckii
MKRNNKNAITFTVCSIFILIVGLILGVSLGATQIGISEIWHSIFNYSERLELVLIRDVRIPRVLCVLFTGGILGVTGAMIQGVTRNPIAEPSLLGVSQGATLVIAIFYAMGISINTTNVMIAALIGSIFSGIIVIGFISKKANNSSITKILLAGTAMSTFFISLTTIVGLLSNQSQLLAFWVAGGFRNATWLDFKLVSVIATIGLIIALLLSKKINILSLGDDVAISLGQNPEKIRLITLLVMIPMCAGAVAVGKNIGFVGLIVPQIVRKILGEDYRINIPCSFLLGAVLLTYADIAARMFLNPYETPIGIFTALIGVPFFIAVARKEKG

SEQ ID NO: 148 - protein, 203 aa, Clostridium beijerinckii
MTRKLIIATVLMLSTVMVSCSTKPSDSPKPSDNNTTTVEQNKDDNGSSNADSKKANETTSDTKKVNKVKLSIYSIDDNSLEPNESGTIEVNENSALQDKLKELAKAVSEKKFDNLPIEVKSIDTVNGKKVATINLTDSNNKKWVPKFQGSTGGSVTANTLIENFLQSNNKSKGEWIDGVKFLYNNETIEYEHASDLSTVKYAN
